United States Patent Application Publication US 2026/0355267 A1, published November 12, 2026 (application 19/123,333).

The application's sequence listing, which the Patent Office published only in electronic form, follows.

SEQUENCE LISTING (964 sequences)

SEQ ID NO: 1 - DNA, 350749 bp, Asteriusvirus sp.
  source 1..350749: mol_type = genomic DNA
ttcaaaataacttggatcgatgtatttaagtatatattcaatttctgagtttgatagttttttaaaaaacttattagtactttttttaggagcaagccagataatccaaggtgaaattttaccactctctatccatgcaattgcacgagcagaacttacattttcaaagaaagtattccattgtacattcaaattttcagcccattcaaccagtgagataacacttcttgcaattgcttcttttgggtgctcggcacgaatcgtttttaatatccattcatcttttgctttatatgtactccattccgtgattggtttgttattgataatcaagtactttacaaactcgtccacattaataatatctctattattcaaatagtattcggcaaaattataaaaatcattaaagtactttgactttataaaagcaataaaaggctctacgccttttttaaatgggaacttattcaattccataaattgcatatatatacgaaaagcctccatcatctggcggctttggcggtcttcgtatcggtcacgttttatacatttatgtgtgtttacagtttcttcacgtttaaattcacgatcacaaaatctacaggtatatacttggttacttgatttctttgccatattttttacattcttctttaaacaatttcatcatagatttcttttcattatcttgaaaaccattattgtcaagaaatgtctcaaatgtttttttatcatactgtaatagaacaattttgtactcatcttcattcatttgagtagatatagtatcaggttgtgagcttttaattaactcaaataattcattatttgcttttttgaaattcttagaaaagtttaaccagttacgtggcatttcttgtccaccaatcatatcatgcactgaacacataagctgatatactaattctggatgttctttcatatcccaaaatccatcattaaccatatcatttagcataataagttggtatttgacaacttcagtatctaccaatgaaacaatttcggaacctgatacaccaaattcgaccattgatgatattaatttttgtgcgtcatcttttgattggactgcaaatttaatacgccaatcataatcactatgacagtacttagttactgatgaaacatttgtccctgaagactttaattcagtaactagttcagtcagtgcttctttaccacctgatttccattttccaaatacactttcaactttactactagggtaggttacttgtaacgaatcatctaaagagcttacccatcgcaaaacagtatatggagtaaactcttttcgttctttttcggtcatgtcattatagtacttataatcagcacggtcaatgtgttttagaaattcagcaatagaaaaagaatgctgtgttggtttttcatcatcatcgaccgacttatttttaatatcactgaaatcaaacactattttatactcctagatacaaatcttgaattttttcgttttcatcggcaaagtacacacatggtggattttcaccactatgtagtgggacacatagtaaattctttttaggtaacattggtatctgccactttgtagttaatgcaaatacacgtagtactttgactggttcaaacttaggatacattgaacggataggattgtaaacaaaagcttttggttctttcatgttaagaatgttttcaattgtacacatctcaaccataccagtttcttcatcacctaacataatttgccatccgagaggcacttgaataatcttttcaccaatttgaagatcagcactaatactattaaatgatacggtgtttagaatatgtctaaaataaaaatcagattcaccatttgggcttagatccaaaacacaatacatttcttcaggaatatgttctgttactaaatccatgtcaaaagaattattttcaggtgttaatacgttcatgtcatctccttagtactgcgaatcttcttcgtcatcataatattcttcatcatcttggtcttctacaccataaaattcaagtccataagtttcacacatctcttgaattttatctacatcagtatccagatatgaatcaaaattaccacttagacttactacatcaataaaagttttcgtgtcagtacttgcatagatgatatcatatttcaatgattctactttagaatcaattcgtgtttgtaattcatagatattaatccaagaatcactatcaatattacatctccatacgttagtatcatccgtttctagctcaggtatatagtcaagagaagataccatgtcatccataataccatcatcgttcaacaatacatccataacttctaaagtttcttggtcacagataaaagcaatactagatctcaattccattttattttacgtccttgttgttgtcatatgacacattatatcacaaacagcgggtttatcccgctgtgttttcccaatctttaacatctataatactatgaggatattgtgcttccttatagtaagctaaacgttctcgtaaatgctttgcactatacttattagaaccactaatatcatatatttctacgtgatctttatcttctgctcggcgtaatccacgtccaattgactgtatagttcttacaaaactttttcctggctcaatcaatactacattatataaccttgaaatactaataccagtactggcaacgccgtatgtcgcaataagtattttattatcagcccaacgaatttcaccataagatgattctcgatctttctttttggtttctccacgaacgaattctgattttggaatacctaaaaattcacatagcaactcacctgcttcaagtctatctactaaaactaaagtgtttcctgattcagataacgcagatatcaatgacgctacatatgccatcctatctctgtcagttactaagtatttcaactcttcagcatatgatgcaaacttcatactactttttagtttaatacaattcacattacatgtacttagtatctgtttatcttgtaattctttggcagttattttgaatataacatcaccaacattacatttaattttagctgcaaccactggatcttttggaattgtaccagtaagaccccaacgcaatggtacgttgttcataaccttagatagtacttgaactaatgcatcaccaccagcaccttgacactcatcaactataacacaaactacaccatcaataaaatcattcacgtcttgttctgttaattctatttcaccttttttggttttcttccaaagagagttaaaagattgccaagtcgtgattgtatgttggtgaccgaaatctttttgtgaaccatagaacataccagtgtccaagccacacataatatagtcatcatatgtttgttgtactaaatcagtacttggtactattataacagaacgtccatactcttgcactttctttgacaatgcagcagtaatgagagttttacctgcaccagtagctgccaatagtagtccgtgtggattagccaaacatgcattaaccgcattaacttgatgttcacgcagttttatggatttaccttccatgtggtgtcctgcaccgaatacaacatcactaaaaatatcttcatcaatagggtcaaatttaaatccataatctaccctatgatctactaattcaatgtcaatcttagcttcatcaagaataggcaataacttatctaacatatgataataagttgtcccgcctaaattcataaactgaactttaccatcccaacgtccaatacgtcctgctggtgtgaactttgcatatggcaacacatattcagttgcacgaatcatcttttgtctaattgagggatcaagtccctcaaatttacaattcacctcatccaataaggttaacttacaagttttcatccatgattacctttattaattagttcgagtattatattcgtactcaaatgtatatactaaatctttatcacagttagggttacttgcatctaaaatgtcactattagtaatcatccattcaatgtaattcaatggaactgtactcattggctcacctttgtgtttaccaaatggcatgaattgataacgcattggtgtgttgcagaaagttacaatttgctcaccaatatcaccattaggttcaatatgtccacgttcgattgcaatttcaactaatttgattagaacctgataacacatgaacacatcgtcttttgctgcgtgtgcattaacaggtcgatgaacatcacgataacatccaaacttataccacaaataacttagagttaagtttttaaattcaatatcttctgcgaacattttcttagcaagacgaagggtacaaatccatttattttcatcaagtaagtactgtgaaattgagttacgatatttatattcgttatctaccatcattctacggtcaaattgtacattatgaccaacaaaatacttacggcatcccataagtgcatcaatgttatctaaatcatctttatacccaacacaattagctacatcctcagtactgataaagtgcacagcagatgcctcgggtggaatatctttcaagggtttgtatctcaatgtatagttatcaatagtatcaatgttttcatgtgaagtatgtggatacgagatactaaattcaataatatcatcttcactctcaaccccagtagtttcagtatctagaactgctacatttgataaaaactcatttaattttgtcattttattctcgcatagaaaaaggacgcgatatgcgtccttaatgataattattctaaacgtgcatcctcaataccagcggcacgtagtctcacaatattgtttaactgaaaagctttcatctctaaggatttaacaatacttgaatatgtatttcttatataagatacctcgtttataagttctgctaactcacaaacatctttatcaccttcaacatactttttacagtcagatgaagatagtgcacggcggtatccttcgagaaagtatttgaacttctcggcttgtacctgacgcatttcaatttctaacatttccaatactgcttcaagttcttgaagctggcttagacgcgtctcatgccagccaggaatctcttgagcaattttttcaatgatgccaatcttctttacttcacgacgagcttcttcaacttctttgttaaagaactcaatcatttcaataattttagatttatcatctttgataatccaatgccaaggtttcattattcctcactaatatccacatcagtaccaaaagtttcatcacctttttcttcttctttaacttcttcaatcaaaggatgatttttaaattgatgcattaccaaatcaagacatgaatcttcattacgcatccactctttgcgatattttagaatctgttcgccagttacaatatcaacatacaatagacggttacctgatttagtgattagaccgtatttttcaaacatatctagtaggccactacgtgggtccatacctttatcccaaggaattttaatttctacatcttcaaacggcttgttgtaacgagtcttcatgactttacatttagcacgaataccatttacttcggaagttttatttccgtcttcatcttctttaagttttaatttacccattgcgataaccatagatgaagcataaatcaaaccactaccacctgaaactttaggatctgggttaaacatgtcctgagattcataactgtggttaacgcaaaccataccaatgttcaatgaaccaatagagtttacacagtttgtgatatatgctttaagctgtttgggtttatgacccatgtcacctttaaggttacccgctttcatttgatcattggctacttcagtgtttagcataccaattgaatcaataataaacaatactttttgacgttcatctttaggtgtattttcgtattctttacgatatccttcaatgaactcataggtgaattttgcaacgtcaccaatcatacccatattgactttcaaaagtttttcttcagaagtgtcaacaccaagtgcttgaagccaatctgaatccaatgcgttctctgagtcaatcataacaacaaagatgccttgtttttgagcttcacgtgcaatattaccagatacgataaaagatttaccactacctgattcaccagcaaacatagttactttgcctagtgggataccacggtcaaaatagccactgatgcgataatttagtgcgtagttaccagtactaacccatgtatctggatcatgaaaaccaacactaacaccagtattctttttaacactaccagtactgtttttaagaatgttcgcaaaaccacttgtcattttcataattcgctccttgaattttatgaaataaaacggggcaaactccgttgccccttaacttttcaaaaactattacttaccttgttgtttcaaacgagcaactagtgcagatgcagatagttgttcttttggtgcttcaggagtggttgctgctggggtagcgactggagttactggagcagcttgtggggctggtgtaactggagcagtaggtgctactggtgcaggttctgactcttgttgtactggagcaggagttggttttgattcagtaacagttccagagttaggttttggtacacctgctggacgatatgcaaatgcccaacgtgctggatcatatgcttcaccatttactgatgcttcgaacatttcttcaattgctttcaactcttctggagttggttgttttggcataaaatcatttagattgtataggccatatttttcaattgctgctagttcttcttcgtttagtggacgctcagacatggagaattgagacatgtcgtagctattataaccaccaccattcttagttttaacaataccaaaatcacgaccttgaacgtagtgagttggagactctttgatgcctgggtttagcaggatggatttaactttatcaaagatatctttgttagccagaatacgacgaattggattttctggtgcaatgtcgtcttttactgcaacgctatcaggagcaataaaacattgcattagataggttttcttcttccagtaacgaccagccattgcttttagttcttcgttccctgtttcattcgcactttggaaccattgacgtacttctttcagaaccggacaggatttaggaacccacatttcgttgcaaggcacttgaacggtaactttatcagtgtgcataccgactacaccattgaaagttaggttaatcatgtcacgttcacgccagaagaatgggttagactcatctgcatctggtagaaaacgtaggtttagtggttcgttataaggtacgttccagaaagctaagaacgaatcagctttacgctcgccagtaaatgtaccattcttttgagcttctgctttttcttgttctgcttttaggtgtgcacgaatttcagctagagatttcatatatatcttccttgattttgggtttctttgttatttgttaattggcttcaatgtttcagaaacttcattgttccttcaacgttttacattatagcacaggtttttatactgtcccatattttttaactctgtttgtcaaggctcatcacctcgacaaacatcattatatcactcactatttgtttgtcccgctattttttaccatttgcccattccttgagcgattcaagttcaggttctagtaagatttgctttttaggtttgttacctaaaagagaatttcctactgcaatgataaattttgcgtcagatggttccatgtaaggtttctcacatatacccattactgcgtccttaataataccatcttgaatcaaatcaacgattttattaccaaacataaggactttattttcatcatctggtatttcaccaaattcaaattcaccatcaactggtacacaacctaaacatacacgttttgcacttcgtgttatttctttggggtctgagatgtcagtactgatattttgttgtattgtatttaaatattcagataacattttacactcatcgagtagaaaatacttcgcaaaacttctattatggtcgtgatcggagccaagtgttcctaacttattagcaaaattatctatgtatgtattaccaattctcggtagttccttgtgtgtactcagttgagtctgatatccacgtggtgttccagcgagctttaagttatttttcaaattattaatgtattgcatagttttggaagcataatggcttcgaccaccaatttctagttctgatagcaacgcttttaaattttcaaggtcgcgtgctgaaccttctatataagacccaaatttatcaccatactcgccaccctcatttaaatgatgggtcattgctcttgctgcatgtaaatttgtagtactcattcgtctacgttcaccattagattccacaaaaatctcttttatgtttctagttcgtgaacccttaatgccttcttctacacgactcttatgaactactaccatctttgctcttggtagtttgtaataagaacgcatagcacttccatcaaggctttcatttaaatcattttgtttagtttcttccatattacgcatggcaatgtgagagaactttttaggtaaattcccagaaccaaagtcgtatactgtgaaaccatatccatattgattagcaacgtttttaagacgttttaaaacttgtaatgtttgttcatcttttatatcagtacttttccatagataaacttctgggcgtactgcgtcatcaccacttggtgcttggatcataaaattcacaggtctaatataaaaccacttagcttcctgtggactgatagttccttcaccttcgtcattgaacatagtaatactatattcatattgtggtgctgccaaaatcttataaatgtctgaacaaagaacccctttcatcatagtggtgtctccttcattttttataatattatttatcggttataagtcatcatgtacccaagtggcataaaatatgactcatcgaaatcttctagtgtttctccaataacatcagcagtattttcttcaaatttagaaataatatcaatcatacgcacaataagtagtgttgcacttactaagtcatctttacaacctaattttgccttaaaaacaccgtcttctgaacctgcacgtataaaatcgttaagctggcgatgtaagtttttactggcaacatccattcggaatgtttccatcaatttttgcatatgaatacatgcagtttttttagtacttttagttgtagtcattcccttacgaatacgaccagtgcgtgttcttcttggttcattgattaatgttccagggaaattctcaatacctaaattctgtacagcaagaattgctgcttcacctatactgttattttccaatgtccagaataaactatcttctatgtttctggctcccatttcttgcatttcataagcaatctgcaagagtattcgtcttaaaagttttacttggtctgtaatcaaatatttgttgtttttccattctgcaacttggcgtaaggttggtaattcatatacttggattgctgcgtcatcaccgccagtaccgccacttgggtcaagccccacaacataagtcattccatattcaattggtttgaaccactgaatgtcatcagttactttaataggttctcttacactacgttttttaatttcacttagtttaataccgtcaattaaagtttcttggtaagttacaaactcacaattgtattctcgtttaaaacgcgatgaaccgatcttatattcttctttagttgcccattcttgtgtacggtcagggtgagaatcccaacgtaccattatacctttaaaatcatttataccagttccattaggatcgtattcattaccaccttcatcgacaaaacgctgggattcgttccatatagaagcaaactggtcatactcagtgtttggtgtactagtgattatacaacgacctttggatgatacaagtgttggtgatactgctgaccagaattccgcttggaaaccttcaggtacgaatgcaaattcatcaagataaagtaagtttacagaaagaccacgggcagcagatggtgtagttgcacgggcaataattcttgatttattttcaaagcgaacttcagttacgttatacttttcaacaccatcacgtataaagtcaggacacatctcatatgcaaactggatacgttccataatttctttagcagttgctagaatgttccccaacaataaaattgtttttgtagagttaaacatagcataccacaaaataaatgctgctgcaacagtagttttacccatctgacgagccgttaacataatgttgttttcataaccttgaaagtttcttaccatttccttttggtaatcatatggcttaaaaagtatttcaccacctttactaacaatgtaaaagtaattttccataaagtaaattgggtcagcagcacactttgctaattcttcctgttcaaagacggtatagttcatctttagaccaggtttttttattcgagtatattccaactcatcttcataattgtctatattttccatcatatttccctttcattaggcaatattcttcaaatttatgaatgcctaatatatttagcattgtttgttggtatgaaaacaaatcaatactattatgtaagaaaaaagggagatactctacttctggaaatttatctaatatagagaaaaaagataatgaacgagaattaattattacttttatatttttacaatatctaattgtatctaacatggcattgaagtgttcatccctcatatgcgttgacagatcaatgataatttcactcctaccaaatccgcgtaaactatcatctgataaagatctatatagtatttctcctataacagtacttttacatctaataatacttgatgaaccagtatgcataactgatagtttcaaatcaaagttattattaatatttgatatcattttttcaaaatgaaacttcattgattgtatattagctttaaacgaagttggtgctgatataaccatactttgacgttcttttgatttcaaaatcttgtaaagtgcataagcacctatagattcggtagtaccaattcttggaggaactacagcaacatacgtattatcagatttttctaacattctatcaaagatagttgaactatcataattcgttaatgtattataagttattaaattatccataacaaataaagggaagtacattgaaaagtacttccctaatctccttataagtttttttgttgataagttagttccataaatgttttatatggaccatatatatcgtctttatgttcatcaaatgtatcagtactgattgtacaacgtgggttatatgtcccagcttcggttttaacaagccaccagccaggataaaaacgttttttggatttttgacttttcttaaaagtacacaatccgctgtctgtttcttgtacatcataaacattatcagtttcgttaactggataatctcctatgaacttagtatttgtatccttgacttgtacttcttcatatttaaatggtgttcctaatagttcttccaactcatttaaagaatcaaacttcaataccccatctgacgtaaaaaattcaacacctttatattcagttgggcttctatcatgatctattagaataccaatcttttctgaactatcagtttcagcgatataagaataatcagttaatttttttagaattgccatattactcatccttctttgtgaatagtttaatatatgattcaggggaacgttgaacgtgtactaaatcatacttagcggcaaatcttaagaaatgaacaccgattaatgggttatttttaggttcacggttaaaaataacatcatccatcatttcaataatttcaggtggttgtttagtcaaatcaaccagtacttgattatgtgcatatgcatctttaacacagacttcaactccatctggtctagtccatttatgattcataaatgaattccatgcataaccgcgagagtgacgatcattaaatgcttcttcaatacctactgcttttttagtacttttcattcttgcaccaggatatgcactgaatacattatctgaggtatcacccttaatacatttttggaacaataaaaactcagggttaggagtttcaatcggttttccttttttatcatgtgctggttcattatttttatcaaaaacaccagttgttgtatacatcatttcttgtactgggttatattgacgaacattaaatgcaagtaattgacggaagtcggtatcagtactgacaatgatatggtcatcttcaggatgtgtttgaatccagcgagcaataaagtcatcagcctctgcttctggtgcacgtagtaaagtactgttagtctgattatctacgaagtcgatgaaatcattaatcatttcaaacatcacttccatttcttctttttcatctttagttttgctggctgcttttactgcacgatttcttttataatcttcgtcaaactttttacgccatgatttaccctctgcacagaaaacaacgtgattaggattaaacatgtcttgtagttttcttaaaccgctcaaagtaatatgtagtgctaaccccacctttgtccatatgtcaatactttgagatgatacgttgatactacgatggaaacagttttgagtatcgacgagtagatataattttttcattgtaaatccttttaatagtgttgatttggcacatgaaaactcaattttcaatgattttcattgataattatagcacatcttgaatcactttcccagatttgataaataatatcatagaaattcattaaatatctcagtaaatttaaatgctagtgatattttttgataaataactttaagcaggatatacctgcacaaaatttgacaaggagattttcatgagtcttaattcttttaaccgtaactatggtatgtctagcgttgctcgcgaatggtggggtggtaataacggtttcgttaccatcgtaatcgatctaccaactgatgttgaactaggtactaccaaagttacttctgacggttctgatgttcaagctgaagcgtatcaaactgctctaagtaatgctcaatataacctattcatggttacccaactactacaacaacgtgcagttctagttactacctctctactagctcttgattcagaagttgttattcctgctgatttcaaaaatgctaatccaaacgtagttgcgttcggtactagtggtgctgatgtagcaggtggtgctaattctgttgcattgactttcatctgtgaacgtcaagacgtatttaacaagcaagaagttcgtcctggttcagcatgtcctgctccagttgatccaactgttgacctagctaagtctatcgctcaagctaaagttttccgtaccaaaactttcgtaagtcaaggtactgatggtgttggtgatgcaggtgcatctactgctgtagcaattaaagtacgtgctgctcttcctgttcaactataataggaggatagattatgtcatatactaatacttcttttgaacgtatcaatggttattcctttgaacgtattctaggttacttttgtggcactaacgccctagcatccattgctatcagtaagctaggaaacgtaaacgttctagttactggtgcagtttcttcttatgctggtctacaacgttttctaaacactgatattccagaagaaattctagcatatctaaatgataaaggtatcaaacgtattgatggaactgcatttgttcttggcacactagaagctgattacaatgcatcttatgcagcacaaactaacgttaaacgtattgtcgatgttgttcaacaacgtgcggttatcatcgctacctctaacatcgcaggtaatggtcttgaagtatttccagttactggtttcaccaacgcacctgatggtgtattgagtgcaggttcagttagtattgctgatgcttccgttgtaaccttcctagttgaacgtgctggtgtctttaacaaagatcttaaatcaccacaaggtgtaccaagtactgaatccgaagaaggccgtctactaattgatgacctaactggtgttccgctacttgctaaagatggtgttactgaagtttatctacgttcccagtctgctgatgcagcaggggatttcggtgttaaacttttccaatacatcccagcattggtttaatattttacaaaagaaaaggagagcaaatgctctccttttttatttttatctatatgaacgaaatccttcaggtaaaccaggtagcttgtctaatccttcgttcgcactcactagctttgtgtcgtaatcatcactgaaatcatccgtagcaagtttacgccccaagtctctaacaaagttatctatgatttcttcttcatcattacctggatgaccttcggctttcaactttttccagaaatattcgttatagtcaaaaacaaactcaacttcatttgtttcaggatcaagaaccacatccaaatcaatccaaggctcttttcgaagtgtatatatctcctttgaatattcactttgagtgatttcttcataacgatatgcaaattctatagccttaagccttttttcatcaccgtctggcattaactcaatgatttccatatcatattctttttcagtaatagaaccagtacttagttttgcatcaagaactttaacattatactgttcacgagtaattttagaatattttagttcaacatcaagtacagcaattagatattccaaatctccaattacgctatatttctttttaatatccaattgggccacttcaacttcatatggagttagatatgtcaattcagcaactttcatatcagcttcataatcatcattgtagtagtatgctttagctatctcttttgcctttccagaaagtccccagtgagcagggaccatccaaaatggaataaatttctttttagccatttttcttaccaaaaatctcttcgattttcattacataatatgtatcttcaccaccaccaagatcttcagtcagaggtgtgttcaaagatgaacgaccaaacacaaccatatcaccttctttaatattatgttctgcaagttgtccgttcggaagaattttacctggaccaacggaaattaccatcccaatacatggtggttcaacattacctagaataataccaccagtacttttattctgtgcttcaatttgtcgaacaagaacgtaatcattaatcattttaattttcatattagtaacctccagtatttgcaaaccattttccacggaaataaagattagcacccttatcacctggagtgaatacttccaacttcatagttttttcaccattacatttaggacaatcatgaggttcatcacggtttgcaattttaacaattttttccatgctatgtttgcattcttctttttcacaacgatatgtatataatggcattttgtattcctttactttttaaatcaaaccaatttggggaacactatgttccccgttatttatattagcagcctgttacgtaaaatttgtatactgcaattccagtatctagtgttacatttagcataccagttttagtaataccaagtgatactgattcggcattggatacgcgagataatgcttgaagtacgcgatcaatattataaccaaaaccaagacctaattcaccttcagttttagaaaaagctagagaaccaacgtggttgcttttgtttttctcaccaacgtgaaagtatagggtgtcaccttcagtatatggagttacaagagaactaaaagatttaaatacgccagaaaaactctttagttcctgaacttttgctgcactaggaataacctgtacgtcatatggttgttcatggaaacgtggttgaactggaataagtttttcagcttgtaccataaatgtagtgcttgcatcttcagatttaaatgcaagacttttaactgaaccatctttaacatttgatgtgattgtggttccttcagtactgtatgtttttagagacattagaccctgaagaagacctagattacctaaaccaaaacgaccctgaacttcaggaacatcttctttagtatatgctcgcattacaagagttcggtcatctgtgtacgcttctagatatacacgttgtccttcaccacggtcttcactgcttactgcaatacaagagaagtcaataccgctggttgtgtttacgaggtcacgtagtacgttgcgtagatccattatataattctccgttttatttgttaatcaaaaatgtttttttatgtaagattactacaagcaccattatatctcaaaaatgatgcttgtctcaattttttatcagtattttgtattccaacgttgaagataaggcttatcaattgtagaactcatgccaattttatcgcgtaattttttcaagtcttttaatgtatgtacatcatcgacaaaaacaactttacgctttttcacaagagtgtaaacatcagcaatctctccgtcaacttccactgaaccagtgcgagtaaaacccgcaccaattagaactacttcttcatcattatcatacgctagtacagaattaatgataccattaccttctaatacttcaccaatacgcttatatatattactcatcatttttaccttgtaatgaagtccattctacatatttttcccatgcctcatttacactttcttcagtaagattcaacatctcattagtgaaagtatcgtttacttcgtcatagtttagttcaatttcatttacaataaccatattattactccttaccaagtgaagaatccattgtttactgacgcagtacttttttcatgaataccaatatccatatccaaaataccaaaaatattctctaattttttagttagaacaatctcttccattttttcagtatcaaatggtagttccaagaaccattctggaagatactcaacacagtcaattggataaccaactgctttaattcccataggattatcttttaagttacagacaattacttttgttccatctgttacttctggaacagatttatcatcataaacttcacgtagacggttccattggataccagcaagaacgtgaccaactttacacttaccagttagctgatattcagcctctaaattagtgtagttttttacagtttttggtgaacctttttcatgtacaggcatatccttaaatacgtccttaaactcacgtacacgctgttttagctgctgttcactctcacctaccagtaatgcgattagagtctcttctaggaagttctggatgtattttggcgtgtctgagcgtttaatttcaagacccatcgctttgatttcacctggtttaccatcaatatctttacggaacccatcttcccagtacttcagaattgcataacgttttttcttcaagaataggccacgtgaaccaaccatctcaaggtctgcaccaacaatcttacctttttcaataccagtgttgaacatctcatgcataaatgatgggaaagattcaccaacttcttcaccaattttaatatacatatcaacaatctcttctttagatagattatatggaataccttgttctttcagataatgcgttacactaaagtaaactgagtcagtatcaccataaattactgaaccaccttggtgattatatacaccagtagtaatctcattgatacgacttgccatatgtttggtcatagaacgtccagttaatgttacggattgacctaaacgtttgtcaaagaaacgagaacctttgttcaatagtgcaccatatagactgtttagaagaatcttacgaatctgttggttctgtttccagaaagcactacgttgtttgaagtaatctttttcttctttaggacagaaaatacgaccatcttttagtactaaaccattttctacaatcaacttagcaacttcatcccattgtcctttaccaatttctttacgaagtaagtatacaggatcattatcatgaatattagttctaaacattgtacctggggtatagtttgctagtagtggttcaactttttcatagccattaaactcccaaccatcagtatacatatgtttgtagtcaataaccattttttgctgagctttacgttcagaataccattgagttagaatgtcaggaattacaccagacttagacttatcaaaaagtgttccgtttgcactaagtacgatagtactatcttctgcaaaaataatatcatatagctctttgcccgttgctttaaaagaacttccatcttctaaatcaacaatcaatgtttcttctgacttttcatgaaccattgtaaattcaacagcagcaaataaaccatgccatgccgcagtccaatctggttcaaatgatttagatttagatttgttcttctgttcttggattttagctgcaagatacgcatcggtgtaatcttgacgtaattgaccaagaatacattcagtactcatacccaaagtacgtagaactgtagggtaaagagagttaaagtcagtacacccaaggtcacttacaagtcctagtactggatcttgtacccatgcacctgctgcttttgcactaattttctcatcttcatcttcaccatcttcaccataatattccatttctggatcaaactcaagatcatctttaggtgctttgttaaaaacaacttcaccacgagtatgtgctaagttgataatagcagtgtcgattagtgctactgaacccattgttgtgctgataagtacacattctttgtgtgcaagtcgattgtgtaggttgatatagtcacatttagcatcaatctttttaagaagaatactatcctgtttagaataacgcaagaaagtaatgtaatcctctctgtaaagtttatccaatgaaccttcatatgatactttattttctttagttactttttcagcaatataatctagtttataagattgttcaacttgaccagcatgtttcttatacaaagccaaataatcaagatggacgcgacctaccaagtcatatgtttgaacagttttaccaaagttgtctgcttcacgggaatttggttttttattccataaacaccaacgagcagttgttgcttcattgaagatttttttagttcgattgatcatatatggaatatcaaagaattcactattccatcctgaaataacatcagaatcatcaattaaactaaagaattccataaacatttccttttcgtctgtatataaaattacagtactgttaggatcgtttgtttcttcatttagttggcgaacaatatcttgtgcttcataaatttccatatcagcaggtggtaaagtaagtacataatcctttccagtccacgattgatatagagaaatagcggttactcggttaaacgggtctgatggtggagcataaccaaatttcttatggaaatcagtctcgatatcgaagaacacgatgttcaaatcgggtgagccttttcccatatattctttggctaatgttttaaatgtaatgttacaatcactttcaaaaatacgtagaccttcacttttgtgttgctctacacttttattcatttgagcttgagtttgaaactcaaaatgtttagccattgtaccataaacagttttatgtgttccttgtggggattcaacataatattcatatactggatctaattcgcgtagaatacgtttaccattcttacgttcaactacatgaagaatatcaccagtacgtttacgttccatataagcatcgatatacatcgtttgtattcccttacgtttattaagttaaaaagaaagcctccgtcattggaggctatttaatatattttagtaaaaattagtaatcatctgcttgtggaagattattagtaacactaagaatagtttcgatattatcgagtttattttgtttgtcaaagtaatcacctttgtacatacgttgtgcagcttgcttgatatcagatgcatcgataccaagttcatcagaaacactagaaacaaaatcagataaggatgctttggtatcatcaatgaaagttagttgtacgacaatgttgttcagtgcatcgccgagacgtttacgttgttcatcgtttagatcacgaatttcaactttaacttcttttttagatttagccattttgtatttctccatgtgtgttttcaaaaaaatgccacctcaccacaatcggtgagatgacttaattgtatcacgtctttacgtgttgtctcatttttttccggtttaactggaaatgaaaatgttttcttgatcatgtctgctggtttgattgaattcaattgcgttacataatctttcaattttacaaacaatacagcttcttcatcagttgctaactcaagatccatagcagtttttaagtgtccaagttcttgaattgcaatgtatttcaaattagataattcattttttaggcgttcaattttttcttctttagtttcaatatagtcatgaatagtatttccatcgtaaaccataccataaagtttgttaatatcaccatcatattcaatttcagaaacactaaaacctaaaggtactagatcataaatgttatatgatgctgaaacaattaaaccattagtatcatacataaattttgctttattaatgtcaaacaattcacgagattcataccaatccataccttcatcggacatcatatacaaagaattaggattaccaccttctttttcatacatcttaaaatttgttagttgcattacacattccttattgttgacgtactgtttcccagttaccatttatttgcatttgaacatagcgataactaattcgttctaagtgagtgcctgaactaccattaacagaaatccatacgccatccataaatgcaccttctggtgtatatgtccatgaagaatcaggtattttacttgtttcaatacgtgcactcaaacgaatactttgtacgttattagtactaatttgcaaagtaacgttgccactagcatcagcagcagtaccgttaattgaacgaacaatatttttaccaccaacagtagctgagttgttagaaacagttaatgatggagcagctaaagtaccagaagagtttacagtaacttctgctccaccggaacgtaatctcaatgtattatttgaagagttatgatacactgccgcacgctcaccaccgcttgcgttacggaaatatagaactaatgatgtatcatttgacttaattgacgcactgtttgcaatagtcaatgaaccagtcattgtatcaccagtttttagtacataacgagtgtttgcaactttttcactcaatgcgacgttagattcagcaatgttatatagatatgcaacgttaaagtgttccacatcaatgttactaataccatgatagtgtggttggtttccaccaagtgtgttagtgtttccactaaatgagtgaatgtggtctggtgcttcgttaatgttattgattacagttggtataccgttatcattacttgaagttaacgcatttagaccactacggtccataccttttagtgcttgactatgaccatgacgaccagcagcccctgtggtcccactaaaactaaatgagtgtgatggtaattgggcaacacttaatactgtgccgctaatattaccgctactaccaataacactatcagttttagttacacctgatgtggatatcccttttaagtacgcgttttggttaaggtttggtacttgtttggtaattgtaccattttcccctcccattgccaccacataccatcagcaaaacaccaaccgtcggacgttttccacggagcaccttgtgaaccgtttctcccactttgtccattcgattgtcctgacatttgttcacgtatactagcaacagattgaccagaagtcaatgaatattgtgtaatagcacctggtttaagtgaagtgtaaagaccagttggaccagaaccaccactagaagcagtagggaatacaatgtttaagtttgttccactaatacttgcactaggaacagtactactactgtatgttacactttctacttttaaatttaattttctgtttacttcatctaatgaaattctaattggttccaaaatagtatcagtatcgtatactgcaatccaacttgtaccgttatgatacttcaaaactaattcgtttcgatcaaaaaccattgcaccttgttcaccagtaggtaacgtttgtactggtataataactgatgacgaattaaaacgaataggtcttgggttagttggtgtaccaccaagcactattagttctaaagatccattagcaccagtactggtcattgtatccaatgggttattaaaacttatgctcatgtataaatccctttatgattaatatatactatatttattcctatagcaagtcattatccatatcatcccacacagaatcaatgatgtttgctgctatctttttagacattttaaaccactccgtgtttggttgtctagttgcattcatttgtttaagccttttatgtatctctttttcagctaaacgtgcgtcttcaaagtgaacttcatgataaacttcaaaatcacgaaacggggtagctgtctgatacgttctcaaacgctctgtcatttcagatttagaagtgaaaccaatcttaacatagtcaggccatgcagagtttattataacataacatatctgtgacatagattcaatctccatcattaatatggagatatttatctatcaactaatagtgaattttaaaccaatatcaattaaacgttgaaaaggattatgtggctgaaattccgatggttcttgtgcaatgtttagcacaggagcatcagaatgcagcaccgacatacgttctctataatgatcgatgtattcttcatacaacatatcttcagtatgtgtattaagtatatcttctatgaaagaatctaaactataatccaatctatcatcattataatacaatgtttcagtggcttcatcatatccaactaacgtaccataaggaacatttatttctatatttgagtactgactcttcaagtactcttctctattaaatttgtatacagttaacatccgtgtcaactcctttagattgtttacttaaaggtatttacaatttccagtacagattttagatacttttcatcaaacgtttcagtaaatcctgacggcaactcttcagtacttactactccactttcaatgtactgcttgataaacttttccagtaagaggggtttattaccatcttcgaagaaacgttctactagtacttcatggacgaattcagaatcacgactctgttcgttcactctacgtttcatatcaccagtgattccatatttgtaaacggttttatctttattagttagtttctgtacataaaaatatccaggcttggaagtctgataaccatacttaccgcatgttggacaaccacgacctgtcaaatgtgctttaggttgctgatgaaaaatatttttacaattgttgcattttatctcgaccattttttcactatgctcatacataacagatgagtaatcataattattgttatgaacttttacagcttctgcaataaattgctcggttgttctcccacctttacctgaacatataccacatcctgacttcccaagtatcaatgtttttggatcaacttcccaatcatgatttccttcattgcaatgcactgtgacttttgttgttctgttaatatagttggttttttggaaactaaatttatcaccataattacgtttaacaatttttataaattcattattcgtatgcactacattaatattacaaacgttacatccagcaccagttaataacttatttggtgttatgtgaaaataaccattatgtttagtgcagaatattgtaactggagtttttgcattaacataaaccaatttatcaaatttaaatttttcagttccgaatttcttttcaacttttaaaatgaaatcatcattattggaacgctgggacatgttactataacagttagagcaagtacatgagatatgacgaattgcagactttgtattttcaataccacatttgttacatttcaaggtagttttgctagatttaaaaatcatcgaattaaaatcaaactcaccatacataccatatttttcattcattttctttttgaaattttcaattaacattttcaatttactcaacttggtttcgatttgataattatatataattaaaaatattctgtcaagcattttttttaacacaaaagaaaagggactccgaagagtccctattgtttttatattcttgattaaatcttttaaatcgtttataattacatgaaagtaacgtttttgatagcgattttgctgtagtagtcagcagcgttaccaagagatgaagtactgtcggttagctgaacgtagccatagcgtgttaaaaatgtggtcacgagttcaccagtgttagggtccattacagttccagaagccattagtgggatgtatgggcaatagaacacaccagcatcagtttcagcattacctttataaccaatcaaaatgtcctcggcatctgaagcatacgtatcaacaaaaatacgcatagtgctgtttagagtacctacaaacttaacgttagttggtgcttcaaaagtaccttcagtggtacgtgcaaagctagaagtagtagcagattgtagaatggttagtgcagttggggaaacaacagcccagtttgcagcaccacgcttagtacgacgagcaacttcgtttgcttgacggttaattagagtagctagagcagcgtgctcatcaccaacgaaggttgcaacaccagtaactttagattggtcataagttacagcagcagcaccaggtagtgcacgtagacggcttagtagctcttggtcgatttctacagtaacttcttgagcgattgcagccattagttctgcttcaacgtcaacaccatgttgggattgagcatcttgtgcagattcaacagtccaacgtgcagatagacgacgagatttcgcttcaacagtttcacgtagaatacggatgttaacgcgacgacccatagtaccttctagttggctagtaggagcagcttgtgggttgctattatccgcatttagatcaccagagtaagatttagcgattttgtatggagaaagcatttcttcaccagcgattacaccaggtgcgttatcagcatattgtacacgtagggtgtggatctgaccaactggaccagtcataggttgaacaccgatgatttcgttagcaataacggttggcattacacgacgcataattggtagaatcactttgtttagagtagcgatgttaccagcggtagttgcaccagaagttgcggattcagttagcataactttacgatggttatcaagaacagtttccattacagacttacgagtaccctgtagaccttcaactagtttctcttttactgctacccatttggattcatttagtagttgtgacattatatatctccttaaagatgttatattcgtttttcagtatgatattatttatagaactgaaaaatttgattattaaaatgctttaaaatgtttattttttattgatacctgaaagaacatctagttcttttaggaatgccatatcgtcagcggtcatttcttcgctttcaacaatagcctgacggttgccagtgattactttaccttctgcaagagttttcttagcggaagactgaactgcttgacgagtggtagcagattcatttactttagtaccgttaagtactgacttatggtacttgctgaaatcttctttaagcttttcagtaggtgaagtagctagaagggattccataatttgtttttgctgtgcagttagtggttttactagttcagacataatcgcattacgtgcttgtgcatcttccataatacgtagtttggttttagcagctttaacggcattagcagtttcatgtagttcttgcttaacttgagcaatttcatcttctttagatttaattgattcagttagggaacgtagcaatgagttttcattaaattgtttgacattaaactcttgagcaaatgcttcaaagattttacgaccaaacatattttgttttgcttccactagatcttgtttcaacgcatatagattcttctgagtggtttctgcaatatatttagcagcactttcagatgtacgtttgatgaagttattacgagcttcagcaatttgacgtgaaccttcagcaagtagtttaacgcgagtttctactagttggcgtttttcagtgtggaattcttttagctcttctgctaggataccgttagaaaaattaacgaatttacccatgcattcatgaagatgcttacgttctttacgcatttgtttaacttcttcagccaaaacagagtttgaaaacgcagagaaattgcttagtgttttacgtagagttacacgatcttcaacgagacgttttttctcttcatatacagcacccatttcttcagcaatgacttgagtaaccatagtgttcaaaccttcggttagttcagccaaatcttgctgataacggcctttcatttcttcacgcatctctgcggctagtgtattcttttcttcattccatgcttcctgaattagctgttttgcctcatcagaaagagatgattcttttagaagcttttctaatttagacattcgttctctcctttaagtactgaaatatctgtacttcaacatacagatatttatatttttaaaatgttaaccttttaatttcttgaaaaaatcgtatatttcagaatctaaattatttacttttttagattcagtgatttttttagaactattacaaggtgatccgtacttactcatcagagattcaaataccgctgttgggtatgcttctggagcactaggttgagcaacaatatcaatagtgataatttcaaaatcagaaactattccattataatcaacgttaccggaaccgcgagaacttacaccaagttttacaccagcctctagcattttacggatattctgaccatgtgcagtatcaagtagtttgatttctgccataccattagcaccttccatccaaaccttagtaatcattgctgctacacggtctaggttaatagttagtgtttctggatggtcacattcaacaagaatgctttcacctttagctaaacgctggttcatgttatttactgcccttgtaatttcagataaagggtaaattctctcgttcaaatttcgttggtcggcttgaatagcaataccacgaagatagcagtcacgcccaccaaatccattatcacgatgttccaaaacaactttagaatcattgaatgaagaccattcacgaatcatactactcataatgatctcctttcagatatttattttagtttaggttgtgctttgcttagtggtgatttagaattagatgcagtagtttttggtgctttaacatctttcatttcaccgcgagcatttttaccaagatctaggctatcttttggtagaacagatttatcatctaggtctagtagtggtgcttggtcagttttcttagcgaatttaactggctctgctcctgctactggagatttagcttctggtgctactggagatttggaatgagtgccagctttttctttcttatcaactggagcaactttttctagtttgaaggattcaccgaatttttcatcgccgaattcaacatcagcaaattcgtcgtcaccgtcaacaccaacttctacttcttcttcagaatctagatcaacttcaccgtcaccgatttcatcaaacatttgttgtaggccacggaaagcatcttggattgattcccattggtcttcggaaggaacatcagcatcagctttcacttcaacgtcaacatcgtcttcaccgtcaccatctgcatcagcagagaattcaacttcttcttctgcactttcatcttcttcaccaagggtgtattcgatttcagcatttagaccttcgtctggttgtacatcaaaatcttcgtcaagcttttcttcatctttgactttaacttcgacttcacaatcttcatcgtcgtcttcatcttccatgctttcttctagttgtttgttaatttcttgagcttgctcaacgaaatacttacgcatttttttatcagcaatatcttgttcgccatttgcaaacgccgcaattgcttcttgtagtagttttaaattcgccattatatcctccatagatatattacattcgtataaagtatgatattatttagtactgaataaaatcgccttttttaaaagctttaaaaagtgcgattttcgatttacattaacccagaaccgtcaccagttggtgcagcggcataaacaactgcaaccacatttttgcggcgttgttcttcatgtgctttaaattcacggtactttcttaagttgtttaatacttgtaatgttagtttcggttttctggaatcagtaattttatatacgttctgatcatcttcagggtcgtacattgaatcactgctagattcaaagatgtcctttaacatttgatctccttgaaatatgcattataaatgagggtaaaaataaaccctcattcttatacactgttatttatgtttaaaaagaattgcctaaattattagggtcgaaaccaccacttccactctgttgctcttggtattcggcatcagcactttccaaattaccttctccatcaataccaagatccattccaggatcatttggagcatcaataccaacagactgcaatcctgcggaatcttcttcaccaccagaaggttgggaaccatcttgtggattctcttgtaaccacatttgttcattcttaacaatatcagctttagaaaagcccattttttcaagaattgtttgtttcgccatataaggcaagtcattaagaggaagatatgtattaattagtttagcatctagttcagctttacgataagaagctaagttaataggtggattcataataacttcaaaagatgaagtactaatgttatatccatttttaaccataaatcttttgaattcagcatcaaaatgttttgcaactaaacgttgataacgcatacattgattattgaatcgcaattcacttgccatagcttgtgtagcaccatcaccaaataatgaaacaccaccatcatctggaccttgtggtagatatgaagctggtatttgaagaccacgaatcaatttattattgaaataacgtaagtcatcaatttgtcctaagttatcaccgcctggtaatgtttgaacatctgaaccacgaccttcagaagtttgtgggaaaaagtagtcttctaaaatgcttaatggattatacgctgcatccattagtgaagtacttccacctttgtttgaaggtattctacgctggtggatttcatttttaaatctttcaacataagccatcgcttggtgtgcttgcatatcaccaacatcaattttaaatacacgacgctcaggtgcacgttgtacacgataaattatgatactatcttccagaagttctttttgcttatagactttaaatacgtcctcaagtatactagtaccaaaaggccataccccatcttgtcctgtatttagtgttagatgaattacgtgttctgcaccaacaggaataacgtctaattgaccgttagtactgaatggatcagcggtatttccttgacttgtaaaaccagatgcaccaccagcagctactgaaccaccaccacccattgttgttggaatagctcctggataagcggttttatcaaatcctacttgaaggttactaaaaactttatctttcaaatttaatgatacgtcacgtatataataaattactggtgttttaccagtggcttcgttaacaaatacttgctcaacatttttgggacttacccaataccaatcgaatgtttctggatctcgaatgaaaaattgatcaccatatttcagaagaccacgcacaatttcatacattcgtgttttaaaatcattttgttcagtccatgcatctaaacgatcttcaatagtcgttacttcagtatcaccaatatcatctttatatttgattttatatggtaaaccaaaatcttcagtactttgggtacaaaagtcagcaattatattcaatgcagttctaatttcaggatcttggtccatttgctcatactgactataacgctcagtacgatttgccaatccattatatacaacaggaagataggaagcgaaatttgttttcgttcctgttgatttattgctattactggactgatttgggatggtcgatagtttagaccttcccactgtcatatgtcgtttccaactcattattttcgtccttaactgtttctctcaccttgagtgttttcagagatagttcttagatagttatttgtctgttgcacagcagatagagattgctcattaacatcagcaagttttttaagtaactctttcatgtcttctgatattgtggcattattattagcatttgccatactactaccactatttatcatcgctttcatggactcataatcgtccggttcagcttgaattggtagatcatttggtccccatgctgatttgtcaaatgtttttggagttatcgttacatatggtgcaacatgttcagatttttcaattctcgcagtagctcttggcttattttcaagaccactactaataagtttttcagcaactgattcatcaaggggttttggttgtttaaagtttctacttgaattccattttaaaaaaccatcaaatgaactagaaatataatcaccaaatgaattcattttttcttcaaaataattattaactttttctgcaccatcggtaacagaattgttttctacttttactttgtcgtctgaaccaccaaaccaacctttaacagaatcccaaagtttaccaggaagatccattaggttattcataaagctatcaaatgcttctgaaactttattatatccactaccaaaaatttcagtacctaacccttctaaccactgctcaaactcaccaccaatcctatccaaatacgcaactgcatctttcgcaataggaaccaaaccaaaaccatcaagtgctaactctccgataaattcccatgcaccatcagtacggtctgcaatatcagtaaggtaatccgcaatagaattttgtgtatctgcatacattttattaaatggttcagtaaattctttactaatccatctattgaatctatcagtgaattgtgttagtttatctgctggttgactcttaggatcattaatcgcagcttccatatcaagtagctgttggttgaaggttgctgctgtagtgtttcctaattgtatctgatttaataaatcttgctttattagttctttgttctttttaacaaattccaattgttgacggcgaatttcttgtgaatcagtaacaccactacgtaccaagttctcacctaaatcagcaaattggttcagtactggagtcaataaatcatctggtactccaccaatagttaaacgatgtgaaattaaacgtagaaaatctgcaccagcatcacccatactggcagccgcttcgttaaatgcttttgatgttgcaactgctgctttactagataatccagaatagttttgtaatgcgatttgcattgaacgtgtgtctaatgatttatctaagttttgtgttttatttaatagtgcatcaactgactcacccatgcttttactgaacttagtcatgctcatgataaactgttcagtactttttgcttgatccatactacgtaacatttctcttccaccaaattgcttttggaatttaatattacgtgcagttaaatcagttaatgttttttgagaaacaccatataaacctaattgattttgtgcttgttgcacagtacccaataatttaccaaatgtagaaacaccatcaccatatgcaccatctaattgtgcaacaacggcactatgagtttgtaatgcttcaccaaatgcatcaatactcatcattgatgcaccagcaccttttaatatggagccgtaaccttcagatagagcgacaccagcactgtttattctattataaacttcaagctgtgcatttaacacattataaactgctaaaccagcgtcagcaaccaatttgaatgcagatgctgctgcaccaactggacctgggatcattgctaatgaaccagcaaatgaagatgcactcattcctagtgagtttacaacattgctaacgtttgcagacgtactcatcatagttttgccgacattcgatacttcagatgataatgatttgaatatttttccaaattctttaccatcatcagctttgttatttgttcgagagccacggtttccagtacttgatgaattacttccattacgttttccacttttagaaccggatttctttctatcattttttatattttcagccaataactcacgtatagcactcaaactatcgttgttatctttagtttgattaaccaactgctggagtaggtaatcacttgtatttccagccataacattcccttttaatagatgtattatagaaatatttatgaaactatagagaatataaaaattagtttaatttaatcttttttagtcttataaatactaaaacacatttattacatggagatttaataaaatggctatgaatccacttgctaagtacactaaaattgaagagatcagtactaagttagttacaaacggcgttattccttataaagaaggagttctaggtccaaaaggtgtcaaatgtggagtttgtgcacgtagtgcacgtgatgaaatgacacttaatacccccgatatgttactaaacggagatgcagtatcccgtgttattgaaaactgtgttcctaatgtaattgacgctgatgagttgtatgtaaatgacgttgaaatgcttcttattgctattaaagttgcttctaaagaagaaacatatgatattaacgttgtatgtcctgaatgtgaaaaagaaggtcgatttgaacgtaatctatcatatcttcttgaaactgcacaagcatttgaagaaatcccatcaattgatttagataatggactccgtttagaatttagaccactgacatggaaagaatattcatcgtttgctgaacgcatgttcagtgagcagcagaagactaagtttcttgaaactgctgatattgataaagatgaaaaagtaaaaatattttctgaagtatttgaaaacatggctcaacttaacttcgatatgattggtggagttattgcaaaaattataacaccagatggtgatgaagtagttgaaaaagaatttattaatgaatggcttggacaacaatcgaagggagtacttaaactaattcgtgaaaaaatggatgaagtacttgaaattggtgtatctcatagtatggaagtagaatgtgatggatgtaatcatcaatgggaaattgatggactaaaatatgatcctagtcattttttcgagtaatgcttctccagtcatctcctgaagaaatacaagaagtactgaaggagatagaactgaataagtcagaaatcaaaaatgcactaatggaatgttctgtatatatggataacattgactatggaacactccttaatatgccattaatagatagagacttattagttaagtcttttaataaaaaaattaaaaaacaaaacgagaagcactaattttcatatagccagcacattgttgctggtttttttggttttaaactacagaattatttgaattgaattatgaaaggattaattttaatattattggattcatctaactcatttcattcgttagctgaagaatattcgttactacgtaactcatattcatttaattaaattaattataaagaactttaaaagatttaatacttgacgggatttgttgaggacattttcatccccccgcaggggaatgaagacaataaaaaagagacaatgaagtctctatttcttgacgctgatggtttcagcatttattgtattgcgaatttcttaaaaatatattaagaacgaaagcgggttgctctgtttctctctatcgcagtcatgtgcaacggtcgtcagtcttaatcatcctgacactcacctgaaagtctatacaatcaaacttcaggctgtttattaaaatcacttaataaactcccttagcaaatctggtaaggtgcgatccttatatgtctatctaggaactctctgtatgcttatcggagttctttattgagccgcattgccgtgaggggttcaaactatgcccacatctaacgggtttcttttgctcatcgcactgttgaactgctcatctgccatctacattttcgataggatcaggttctaatttatatgcatttctgcattcaacaggattgtcattactacaacaaacattatagcacaaactttaaagttgtctcactatttttataaaaatattcattaagtacttagttccaacttttacacatataaaaaacccaagtaacatttttattacttggttctaaaaaactatatcatattttaaagttttgatatatagtctttgatgattttaatatgatcttcgaaatactttattctaagaagagtaatgttgttattaaaacagaattgattttttatttcatcatttctttgctgttcagctaaagcttgtttaccaccaaagtactctattggtttgaagtgttgaataccatcatactctattagaagattcagtgaaggaatataaaaatcaaatggtaaatggtttatatttttacaaccatcaaacttcttttccatttcaaatattatatcatactcttttaaaaaattctgaatttcaataactggtcttgactttagttccatgtcagaacaaaccggacaaccttgctttctatgataatgtttagttgccagtactgtgaattctccatgacgtttgcatactggtgtaattgtttcatacataccattatattttgtattggagtagtcgtatgcatccatatgaatgtacttacaatcttcaaagaatacatcttctggtgttcttttctttaaaccaataagtgctttggagcattcagggcaaccctgtccagctaggtgattactaactacctgattaaattcaccatgaccttcttctttgcatatgatagtaattttctctgaacgaatgttgaaaaacactttagagtaatcatacttatcaccgtgtacttcttttgcttcagtaaagaatgactccagtgactttttagatttacgttctttctttgcaatatcagaacaaaccggacaaccttgctttgcggaaatatgtttattaggaactaccgtaaagtcaccatgaattttacatgtaatagacactggttgatgtgcattaacatacacggtgttattgtaggtgtaaatactaccatgtagattaattgatttatctataaattgttgttgtgtcattttagccattctattgtacctcacaaaactttttaatatactttatttaacaaaacaggacaaacagctatgaaaaagagattaaaaaatcctaaagaagcagcatcttatcgaaatgaactattaaagaagcagaatgggattgaccctataattggtatagaaataacaaaaccagtactggaccattatcatggtggaaatcaacattgtaggcaggttcttcaaaacgaagtgaatggatgggaagggagagtggcaaactcatataaacgatgcctaagtcatttaactgataagccattacatgaagtattgcgtaatctggcagattatcttgaaaggaacaatcatataccagaagatgagcaggtcattcaccacacggcattaaccgttgacgtagctaagtttaaaaggcttccagcaacgcagcagaacgccattctaagcgatttaggagtagttcctggaggtaacgtcaaggaaagaactaaacaagctagaaagctaatcaaggacggtaaattaaatatggtagatataaaaaaagggagctaaggctccctttaactttaattagaaaacatcatcaagggttgcatattcaacagtactgaaaccgtcctctttaacaactttgaggattttttcagtcttagatagtaactcttctctgtgggaaatagcataaacgttcttaccacgtacagcagccatatcttgaaaaatagaccacacacgaagaacaccacttgaatccagaccctgatcaatcatttcatcaatgataagaatattgatactttgatataatgactcgtaagtatcacggaaagcacaagataaagcgatgtttacccttgtacgttcaccacgactaagctgtttatagtcaaagtactgaccactcttctcaatttcaacactcaaatcattcaaaaacacgacattatgctcagaaccacacatatcgatgtagtactggagacgtgtattcaaatatgagatattttgctcaataatacgtttacggacataagaatccttgtttaaaagtaatttaaccaagaaatcttggtgatttgacattttatcaagattattatagtcgctataatcgattggtactaaagaatcagtcttcagagtattaatttggctaataaatgtgttagtagtcttcaattcacgatctaattgctgtgataatgaatttacagtcatttctaactctttaacttcatatttgtttaatgtatctggaacttccattagttcatatgagttaagttcatcatatgatgacataagttcatttgcatagatgtttattggttcttcttcactctttctgaccaattcttgaagcttatgttcatgcatttgtgcttccgaaagtgtattataatatgtcacaggtttaggtggcatatcaaaaatctcaatactatcaatttcttgaagtaatgtttcaatttcagaagaagaactatcaattttagctcgaagatcattaatagtactttggattttgtctttaattgaagaagtatgttcgttatgttccaattcagacatacaaagtggacatttgctgttttcaactgttgataatttgtcaatttcagcattaattgaacattcatatccttttaaagctatttttagtgagtttagtttttgttctttgaaacgtttttggttattattctcttttagaataccctctaactgtttccatatctccaactcattatgattttccaattctgcactaatatcaatagtttttagcttatcgatgcttagatttaatgctcttttagatctttcaagttcacggtcatatgcatcaaattttaaagccaactcttgtacacggcgttcgatttcaccacgctttgcgttatgaataagagctttctcttttatgtcagcagcttcatagaggtcattaaagtctaaagttttatatatattcaactcttcatttaacttagatactctattatttttatcaatttcaaactggtttgcctgttcttgtagtgcctcaatacttttttgaatacgttcattacttgcagctacagtttcatttttgaacttttcttgttcggctaaacgtttagtatccttatacatctcctttagcatttcagctttttccgtcaactgtgttattccaagaagttcttctatcatatcacgttgtttttgtgtggataaagctaagaaaggttcaacgttagcattcagtactacaatatgttcaaataataattgagatataccaagaatttcattcaaatcttcttgtgtgtctttcttttctccccttgattcatcttcaattttattatctttccctaaagtaacaaaattgaaatacgtgggacttctcccacgttcaaccagatattgtacaccatctttttcaaactctacaactacttcacaatttttgccattagttttattgactaggttcggaattttaatatcattaccaatacttttaccaaataatccaaaaactaatccttgaataatagcacttttccctacaccatttcgacgtccggtactgtcaccaccttcaataactgcatcattattttgacccagtactaatgaaatgtcggaaccattcaaatcaattgattgtggtgcattaccaaatgaaaagaagttcctcatagatatacgtgtaatgtttagcatatagtcccttataacgatctgtaaatttggattagaagatttttatcaaacattggtgaatcaatttccataatttgctgtaaaactatctcatcaactgattcagtactttcaaaactaacaccatcttcgattaattctgaaatactttgcttgctagttacaacattaaactccctaatgttataaagtttagtaaatgtatcacgaataaaactaatctcatcagttgttattgatatatcaacttgaacttttgatattgtgttatcttgtagataatagcttggatcagtcaacaattcagaaagtgtgaatgttctatattttggtgcattatcccatgacttgaaaataggttcttttccatgttcaagaatcatcacacctcttgcatcatcccatgtatcggaaaaattatgtggaaaacaattaccagtataaactacacgagttccttttgaagttgtttttgactgccttttatgaaaatgtccactaaaaacatactcacaaccaccaaaagaaccttctgtttcttttccatgatcaggcatttctaccattttgttaagcaagtaacctggtaactctaagtgaccaaaaacatacttactttttagttgaggtaacaacttatattcatcttcaatcataaatggaatgaaagtacaatcatcaaatgttgtaatttcattaatgaattctatattttcataaacttgagccatattgatacttgttatatcacgtttgtttttatgatacatatcatggttgcctactaaaaaatatactttttcaaaattatcatttaataattgaagaatttgtaaaccatagtttagtgtttgaatattgatattacttctattatgaaaataatctcccataaaaacacaaactttgatattattttttttagctacatcaatcatgaatttaatgaagtttaaacaatcttcattgtgttgcttgctgttattctttaaacctaagtgaatatcagtgaatgtaattgctttatcaaacagagccatcttcatttttcctttcaatcatgttcaattcaatttcaatttgacgtgtatgtgatggcgtaaagccatgcatttcaagtaaatcatcacgtatatttcgaacatttttctcactattcaatatagaacgaaaactattgtttacgaatgatgtatagtaagagaaaggatttagctgaactgctggtttatcttttttataaagaatgctctctttaaagagaagtgcgtttttaactaattgtattcttgcatcacccatcatttcatctaagtatgtatagtttctgtaattagatttatgagagatttcctcagcaagtttaatgaacatcttccctagttcatttgtaattttaccatgaacagtactgaattcaccagtttcaagatctcctttccaatgagaacgacatacttcatagagaattccttcattatctacaatgtaatgcttgaatggttcaaagttaactctagtgtcgggtggaatatgttcatcagtgataacacgaataacaacttcatcgattggaacatcagtgataactaaattattttcatctgcatattctttagcttttttagcactcatactttccttttcacgaatactatcaagcatttcattgtttagtcgtttgattcgtgctgctttggctttttcaagtaactcagcagtaatttctgactcatgaaaaacaatataatcatacatactatatgatttgtctaataaccagcagtatgaaatcttacttttttgtatttcacgaagtaaatcagcattattgagatactttttacgctttggcctatttgtcattgtattttactctccatgtttaaatccaataggtacaatccttgtaccatcaatgttattatagcaccaaaaagcattttgtcccacgtataaatacatcaaatgttcccttattatggagaatcaaaaagatgattgatcgtagaattcgattacgacctaaagccgcaggtgctaactatgtatatggtgatttcggggatagctccgaaccaacactactttcgtttctgcgtccaactaatgggttggtttggactgtaacaccaacaattactgaacaaaggtcaattcagtatgaaacacagtctcctatacataccaacagtaactataacaactataagaacactactaatacagttttcactattcagggtgaattttatgcaaatacagcagcagaagctatgtatgcgttggcatgtgttcattttatacgttctgtttcattgatggattttggtagacaagctgcttcggctaataaccccgaactcgcaattgcgggtgcaccaccaccaatcttacttctaagtggatatggtcgttatacatataatgatattcctgttattttaaaatcttataattttacttacccaaatgatgtttcttatattcaagttccattgaatagtagcgatagtacttttaatttatccgacatggatagtagaaaattcttcgaacaacttagaagtactggatatatgaacccacaagatgaagtttgggttccacaaaaaatctcagttatgttacaacttgaagaacaaccaacatcggattatatgactaaaacgttcaacctcaatgcattcaaacgtggtgaactattacgtaaaggaggattcatttaatgtccaactatagtcaatactcaccttacgctaaggtgaaacaaacatggtatcttgggtataatttaccacgtgatattgttccggctgatactgatgatttttatgagatcccattgaaatatgaatatcaaccttggcgtttagcatacgaaatgtatggtaatgaacgcttatattatattttcgcattgttaaatccagacatactaggagaagatcctatatataattttaaaagtggagtaacaattagaataccagcaaatcaaagagtacagaattatcttaatggtactcgaaacataggctaatggagtaacgtatggcagatttacgaagtacagttgataattttcaaaatgatattacaagtattactggtaaggctaaaaccaccacatctaatgcacttgatagtttgaaagctacagcaaatacattacaaaatgatgtaaaaactattacaaaaaataattacaaagcaaatgtaagtaatgtagtatcattaccaaaacaaagtgctagtgttgatcaagtttatgaagatctcgatttaagtcagtttgtaataccgtatgacaataaattgttgaaatatgataacccaacttggcacttttgtttatttgccttagataaagatgattttaaaaacttttggctttacccagatgcagaagtgcaacgacatgtgatatcagaaagtggtgttactggcaaatataatatcactagtgtacaaatgacacaagctggaccttcaacaccaggaatgacaacaaactattgttttaatacagcagtacttaatatgtctgaaaataatagtatgagtctatatgatgaattaatttcgttaagtaacaaacttagatatcataaatttatggacttgccattgatattggaattaaagtttattggctttaataaaaatggaatacctgaaattatcccagaaacaacaagacgctggtcagttaaaattaatagtgttactgcaagtgcctcacaaagtggtagtactatgatgtatactatgaacttagttcataatagagcagctttagttgataacattgaatggaccttaaaagaaccattcaattgtactgctgaaaactttggtgacttctgctttgatttagaagataaattaaatcagatggctgaccaacaatatggttatcttagatataaatttggtgaattatccgaaggtaaatttttcgaatttaaagtagcacctgatttgcaagatttgtttataaactatgattctaaacaaatggcagaggccggaacaactaaaagtggtgcacaaggttctaaaaacttttcatggaacccaagtactcctatatctcgaattattgatgacgttattgatacatgtactgtacaagccgatgatagtactagtgtgcgtcaatttgtaaacattataccagttaaacaatacgttggttttgataattatcgtaatacttctgtttataaagtaattttttatattgttagatttaaaataggtgatattgttcatgaatcggatttacaacctgaaaatttcacatttgagtacttttttgagaacgcagaaaaatacgtagatcctaatgatcaaaaaccaaaaataaacatgaaaacttataattatcaatttagtgggcttaatagtgagatacttgatttggatttgaaatttgatcagcaatttttcgtagccactacacgtaaccctggtccgatacaagatgtagcgaaccatgcaggtacacatacatcccaagaactcaatattcaaggtgtacaatacaatagtataccagacgcatgggcaaaaacaagtgatttacgtgtaactcgtgatttaggagggatgttaacacaagcccaacaacaattgttaactgaagttgaaactttagcaaaaaatcaaatgcaggttggtaacgcagaagaacaagaccgttataataactatcaagtcaatgttttacctcaatatattgaagattatgtaaccacttatgaagaaaacgatggcggtactgatggtgttggtcaccgttatggtgaagtgttcacaatgccaaccgaagcaactaacaatgaaacaactttatccgcttcgttaaacgataacagcagcacatatgaaatggatagacgtaaaatacgtgacaactattacaatagaccttttttgtgtaaactcgatatgcgtgtagtaggcgacccgtactggttagggtggagtgattactcttacttacaatatctagaacaagtaattaatggtgaagatatggaaattaacccagatgattatcatgtagcaaattatataacatctgaagcgtatctattactaaaattacaaccagtaatatcaataaatgataacactggtgttttggatattaatacaccaaccacatttaaccaaacaatttatcgtgttaataaaattgttcatgattttggtgcaggtggttcttttacacaacaaattcaagctgcaattgtaattcgtgcactcaaacgtcacgatagtatagttgattaaggaataaaatattatggcagatacaagtaaaaagtatgcacaacagcagttgggtcgttttgacccatcttatccgcagttagcaactgttatggataacagagatccaactaaatcaggaaaactgaaagtttggatacaaggttctcaaagtgataaaaactcaaaagaatcatggatagaagcatcttacatgtctccttttgctggtaaaacaccaggtattccaagtgctgatgcatatggtcaatatccaaaaggatacggtttttgggcagtaccaccagacgtagggtgtacagttgttgtaatttttgcacaagcccgtacattccaagcatattggattggttgtgtatatgaccagcgtatgaatactatggttccaggcatggcaactgaagtaagtaattatggtggaactgatatgccacttcctgttactgactatgatcgtaacactatcactaccgatatgcaagacaaatatgctaacgttccaattatcgcaggtcttaaaaagcaaaaccttttatatgacgaagaagctgggttggcgaatcgtagtagtactcgacaaaccaccagtactgtatatggtatgtcttcgccacgtggtaatagttttattattgatgatggatatactgaagaagaattaacagcaccaacgtgggatcaagacccagatggatatcaagatacacaatttaataacccagtaaacgatacacgtgttggttctcgtaaaaatgaaggtgtcgtaataaaaacacgtagtggtgcacaacttcttttatcagaagctactggtgatgttcttttaattaaccgtgatggcactgcacgtataaaattcactggtgaaggtgatattgacatgcactgtgataagaatattaatattcgtgctggtcaagatattaatattactgctggacgttcatataatattgaaaccggacaagatttcaatgcacgagttggtgcaaatactaaattagatctaattggtgctcttgatgcaaaagttggtggacaagttgttgttaattctggggcagaccttcgtttagttactgctgcatcattacgtatgcaaagtggtagcagtactgatattacggctggttcaaatgcttctatttctgccgcaacatctgcaaacctaattgggtcatcatcagcaattattagtggtggtggtcaaacattaacagttaatagtggtggtaatagcggtactgctgaatttactgcaccaaactttagaacaccatctgctggtcttaatgaacacattcatgatattgctgcatgggttaacgctgaaaatcatggtagttatgttgaaccaccaagacaaggtggtggaagtggttctagtgaatcaccagtacaaccacaaccagcaaatgatgtatcaccagaattacccgtagcacaagacactgaagctgttcagtttgttaactatacatcagaaactgaacaagtgcaatctcaagatttaatgacatctgaccctggaatgactggatatagtattacatatgaaggtttacatatgttcatgccatgtagtggtactattcgccaatatggttattgggggaaaggtgttccaacacaaagtggtgggaagtcagatcgttctggatgggaaatacaatgtaaaggtgacatagttgcacccgatggtggtgtaatagtaattactaatggtgcactgttaatacaacataagtcaggatataaatctgtattttataatattcaatctgatttattaaacaaagatgttgttcaaaaaggacaagttgttggtaaagcaaatggtgttatacagtttgaaatacgtgttacatcagctaacgtgcttggttttagcggttcagttgatccgggtctattttatgcatctcaaactggtactggttcggacgcagccaataaaacattaattgcaggaaaagcaaccaatcaatctgcacctcaagcagtagtgcaaccttctgttgatagtgatgaattagtagttactacaaaaattaaaacaattggtacaggttattcacaacgtggttcacgacatgttcctcgtcgaagaagaacacaaagaagtggtgtttcaactacgccagttgagcaaccaacttataatataggtaatgttgataaaacagccatagattggaaagttgttccaggtgatgctcagtttatttctgaattaaaagaatatgagggtacattacaatatcaacaagcaaagggatattatcgtaatggtaagttctggcgttatttagatagtcgtggatatccaactattggttacggtcacttaattgttagcggtgaaaacttctctgatggaataactgaacaacaagcaaatgatatgttagttcgtgatagtagtaaagcaatttatgatgccaaatcaatttatgcttcatataacatgaaaactccttatcttgctcaacaagtactatgccaaatggtatttcagatgggtaaaggtggtgtattgaaatttaaaactatgttatcagaaatggcaaaaggtaattataaacaagcagcggcacaaatccgcaattctgcttggtatcgccaaaccacacgccgtgcggagttaatggctcgtcgtttggaggcatgtcaataaatattttagcactataaataaaacgaggatatctttatgagtaaatgggaaattaaaaatacagatgagcaattttttaaggaaattaaagaatttgaaggaactattgcttatcagaaaaaacttggttattttaaaaatgataagttttgggtatataaagacagtttaggtcttgatactattggttatggtcatctagttcttcctggtgaaaatttcaagaatggtttgaccgaagctcaagctgaccaacttcttctcaaagatgctcaaactgcgtacaatgatgcaaaatcaatttatgaacaattcggtatgaccgcaccagtacaggtacaacgtgtattatggttaatggtattccaaatgggaaaaaccaaagttttgaaatttaaaaaagcaatgaccgcattaggtaaagctgattacaaaactgctggtaaagaattgcgtgatagtacatggtataaacaaaccacttcacgagcggaaaagatggcacgtatcgttgaatccgtataataaaggaaatagacaatggcagttgtttttaaagggttttctacccctgtagttggtagaactgaaacattgtatgatagtgaattggttcgccaagatttaatgaatcatttcaatacaaaaaaaggtgaacgagcatttgatgctgactatgggtttattgcatgggatttgctatttgaattggaaggttataatactatcaaccttttagaagcagatgcccgtagaataattagcttagacccacgtttaaatcttaaaaaattacaaatttcaagaatagaatatggataccaaatgaatattgtattacagtacgtagtattggacacattagaagaacttactatagtatttgatgcaagaagtaataatcgaatggcaacatattcagtttcgtctttataattataaaagcactcttcggagtgcttttctttttgaataaatatttctatataaatcatggagtgatgtatgaaatatgcaaccactagaaaaaaacaatataagtttataactaatgctataaaagttcatggtatccgttatgactatagtatggttaaatatcataatgccaaaacaaaagtatggattggatgtgaaaaacatggtttttttctacaaacaccgaatgaccatacatgtggtaaaggatgtatgaaatgttctattgaatataatacaaataggcagagaagtccacaactttttttaaattttaagaaaaaagcaaatttaaaatttaaaaataagtttgattacagcactgcaaaatatgttaacaacaaaacgcatatttcaataatatgtcctattcatggaatgttttttcagcgtcctgataatcatttgaatagtagatatggttgtgaaaagtgtatgagagaaagcacacaatctaaagcggtatctgatattgaaaatattctatctaaatttaaatacgttagagaaaagagatttactgaatgtaaaaacatattaactttaccatttgatttttatattgaagatttaaacttgtgtatcgaatatgatggtgaacagcattttcaatgttcggagcattggggtgggattaaatccctgaaacaaactcaacacaatgataaaattaaaaacacgtactgttctgaaaatggaataaagctacttcgtttgaagtataatgaggactatatttcagtactaaaaaagtacttttatgataattttaacatattattaaaggattaaaataatgtcacaacaaaaaagacagtctaatttatatagtggtgaggattggactcaagtatatgaaagtttctataaaatcaatctaaccgcctatgatttcgatactattcgtcagagtatgattgattatctacgtgcaacttacccagactcattcaacgactggatcgagaacgatcagtttattttcattttagatacgatttctatgctaggacagaacttggcatttcgtatggatttgaacacacgtgaaaactttttagatactgcaactcgtcgtgcatcagtactaaaactagctaaaatgatttcttactcaccacgccgctcatatccaggtcgtgcagttgctaaattaaccgaaattaaaacaaaccaagatgttcgtaatagttttaatgaatcattaaaagataaaattattcgttggaatgacccgatggatgctaactggtatgaaaactttattctagtaatgaacagttcatttgtcagtactaaccaatttggtaatccagtcaagcgtattgatgttaatggtgtctcccgtcaactatatcgaatgaacaccatcccaatgacagcacccagtattccatttattgcaactgtcaatggtgaatctatgacatttgaagtagtgaatcctgacattacgtctgttggtgttgaagaacgacatccagaaccacaagagcaaaaatatattgtttatcaaaatgatggtaatggatttagctcaccaaatactgggttttttgtatatttcgtacaaggtacattaacatatcaagattatcaatatgctatccgtgaagagaaccgtatacaagatattaacgttgataatatcaacgaaactgatgtatgggttcaagaaataaatgaagatggtattgttcgtaccaaatggacaaaagttccatcaatggaaagtattgcatataacactgttaatcgtcaattaaaaacaatttttgctgttactactcgtgataaagaccaaataacaattaagtacccagactcaagaagtggtgttgttccccgtgggacgttccgtgtatggtatcgtgttagtaatggtaaaacatataacattaaaacttctgaaattcaaaataaaagcgtaaaatatacatatcgtacaaaaacacagtcaagttatgaatctagtacattggatatacgtttttcattacaatatgagtccgaccgtgcacaaagtgctgaaactattgagcagattaaagcacgtgcaccacaaatgtactatacccaaaaccgttttgtcaatggtgaagattataatatagcaccacttagtttaggaaatacagtacttaaatctaaagctattaatagaatttatagtggtcaatcaaggttcattgatatcaatgatcctactggtaagtatcagaataccgacgtttttagtgatgatggtgcattatatcaagaaaacacgcaatttaatagatcgttattgctcccaactacaaaaacaaatgctagtattgttattgacaatattcaaccattgattggggaaaatgcagtaatacaacgttatcaagcgtatccatccaatacaattggtattgaaatacaacaagcatggactccagtgtacaattcaaattacacaaccaatacatatggcagaattttgggttcgtctggaacagtgtatggttcgtatcaggtaggtactcttattaaattttctaattctggtactacgatatgggcaagtgttgtaagtgtgttagataatggtttttatgtactaagcacatctgttcctagtggaatgcaagcaatagagtacatattaccatatagaactagatttaacacagttgaagttcagtctatttcttctatgttggataaaaaaaccgattttgtaattgtacatgataaagaaacaacttcatgggttccaatcgaagcaagtactaatgacgatactattgtgtataatggtaatgaagttttaattataataaatgtaaaatatacagcagaaacttgggaatttgatgctaacggtattgaatatatttttgtgggtggagaaaaagtaagattttactttgtatcatctaaaaaaattactgatataagtactggtacagttcaaagtgataagattgaaattttatcatctaacactactagtagtagtaattcaggattgacaagtaatatagattttcaaatttatgacacaattcaacaagagaatggctatctagatggttctcgtgttattgttacatctaggaaagtagatagtaatggtataccattggaaccaaaccaatttaaagaaattgttcctacttggactggaaccgatgcattaaaatatggtggtattttggtatttcaggaaaatagtgatttcactatatcagcactgtcgttaccaaatgataccttcacacttcttgattcatcgtggtcttatacaatggaacaagctttggcagagccgaatgcatataaaagaactgaatttgttagaaataacgcaattcgttcaaccacattgagtggattatatagtaaaggttctggatttttagttggttttaactatgatggtaaatattattttattgaacaaacagttggcaataacaatgatcgtttgggacaactaattagtaatttaacttattccgatgatactggcactgttagtcctgaattggctttttatcgtgcaattaataacatgggaactaatgctgacgagaatcagaagctagattattatggatacaaagatgttacttcacagtacactgttaaaactaatgcacgtactagtatagacttccattggaaacactatgcacctgacgacaatcgcattgatcctagtagaacaaacttaattgatatgtatgtattaaccaattcatataaaactgaagttgacgtttggttgaaaaataatgctgttggtagtattcctaaaccaccaacatcggttgaattaaaagatatgttcaaagatgttgaacaaaaaatagtcattagtgatagtatcatttggcatagtgctgagtacttacctttatttggaaacagtgctgctgaagattacaaagctgattttaaagtagtgaaattaccaaacagcacaatgagtgatgatgaaattcgtcaaaatgtcatagcattaactaatgaatacttcaatgttgataactgggatttcggtgaaagtttctattatactgatttgtgtacttacatacactcacagttaggtagacatattagtactattgttatagttgcacaaaatccaaattcaaaatttggttctctatttgaaatcccttcacgttcagaccaaatattcttgagtactgcatctgttgaaaatgttcaaattgttaactcactagctaaaagtaatattaatatcggttcttaatataacgggcgttcttcggaacgccttttttatatcataaataaatcaaatgaatgaacgaattatatggagtccaaaaatgactaataattttaagtttcaacctacacagatggctgaagcagtacagaagaagctttttattaaaagattgcctgagtggatgcaaggcttagaagatattcaaaaagtcagtgatgatgttattcaacaatggtttaatccggctgaaaacgaattagttgacggctatattggtgatatgggttctcctgccgctgctggtaatatcttcttacatgaaagtactgtagcacgtcaactttatcagttgtccactgcttacgtctcaaaaaatgatgattcgacaattcgttcaattcaattttatgatgatctagttggatacatgaatcattatggagcactaaccgataatgaaagccgtttgttcaacggtaagttttatgcatggactccagctattaacccaaataaaatgaacaattttagctcatatctttgggatactaaaaactcttataatattacttcacctgattacattgtaatggaacgtggagcacttaatggtaatacatggtcactacaaaacttttggtatactttaggtgaaacattagaagatggctcaatattaactgaagaattaatgcaagattcacgttttattcgtgcacgtgcaccaattattgaatataataaaaatattgagctaattaactacggtacaaaattccgtggaactgttgatctgttctctgatattattaaacctgaagatatcgttcaaaaagatattaatagtggtatacgtattgatggtattattccgcaagatggaatgcgtattctattcaccagtattggtaacaatggtgaaaacaatagaatttataatgtatatgtgaaaaaaatgcaagatggtactcgtgtttatggtttagcactagatccagaagaagaaaccgaatcacgcccaagtggtgaacctcaagatggtgatgttgttctaatcactaaaggtaatgagtatggtaatagttctatgtactggaatggttctttgtgggttcgtgcacaatcaaaaactagtgttaacgtattccctaaattccaactttatgatcgtaatggtatcaaacttgacaacagtactacatatccatcaagtaactttaaaggttcagagttgtttggttttaaaataaattacaactatgcaactgatagtgtatatggatataacattgaacttggtgattataattattacatttatgaaaactttttacaatcccaacgttatacctatgaccatcttggaaaagaagttgaaattgatggtttatactattataacattattgatgaaaataatgaaatgaatcttcaaaccgattgggttcgttcagaagagtactctaaacaatttgtaaaacaaactccacaagtcaaacgtactgatatgtatcgtgtattcagtactgtttatgatatggaagtttttaaagaaccagttgatggtatgtatgcatatgttattgaagttgatagaacatatcagtactataaagctgaccgagaaacttatctagattggcatccaattactggtgatggtgttcagattgtaaaatatgaccatacattcgaattggcacaaaaagttttagataatgattctgatattattgaagttgtggttgatggtgttgatgtgtccaaatataccaaaaatgtttcaaaaggtcaagtacaaagcatcactctagatagtactgtagaattggatgaagattctgttattcaaatcagaacttatagcagtactgtaacacctgataaagaattaggtgcttatgaagttccaatcaacctacaaaataacccatataattctaatattatatacattaaccaaggtgactacactttacattttcaggatattattcaaaagaacattacacgtggttcttctgatgatttcaatgactatgaagaacgtttggctaaaggattggttaataatggcgtaggtactaaaattatccaaaatgaagcatctatgcttccattgatggcacatactgcaaatgaagatattgatttatttgaagcaactatgtttatgcaatctgaatattttagattcattaataaatttaatacacaaatgcttcgtatgtatgatgaaaatccatcagactttttacaaaatagtgctgcaaacattgttgatgcaattttaactactattaatatgggacgtgatagttcattcccattctattatgataatgttggaagtacttctggattcattcgtgcatttataccaccaacaccacagttcttaggtattcttcaagcatatgtaccagaaaaagcgacattcctcactgctggtagtaaaccaagctgttataacatcagtcatactggtattatttccaaagcataccgtgttatcaatggtgttgataaaatggatgatgttgtatatgaattagaaaatagaatttttaatagtattgataataaattcaaagatgttgattacgtaccagtattgaatagtgatgaccttttccctacaccatatttcactaaaactgaatatagtgctgaagagaaacaaacattattactacgtggatacattaacttcaccgcaactaatggtatcagtaatagtacacatgattatgatcctaacaattggagaacttggaactatactggcacttattatgtagttaatggtcaaagtactgaaattcctgcacgtggttcatggcgtgccatttacactgaccaatatggtacatatcgcccagctacccatccgtgggaaatgtttggctttacacaacgtccaacttggtggaaccaagaatacgaaccaacggctgttcaagttggtgaacgtgatagtgatgttgtatatgtatatgaagcacttgttatgaatgagcaaggtgatttagttcctagtggtctttgggatattgacggaactattggcgatagcagtactggaactattttatttggtgatcgtcgtggtcaatatgacaaatataaaagatttggtgtacagccattcaaaattacaaaaactggaaataaaacatcttctggtattgatatttgtgtggttgaatatattgcacctgaaattttaggtttagtgtctggatctttaaatcatagagcagaaccttggacatatggtgatatgggtgacatggaatttacatacatgaacactacattgtttgcatatgaccaaatgatgcttttgtataaagctaaaccagcacaatttgctaactatttctgggatacccgcaatgataacttaaaagaagtattcactgatggttcacaattcctttatggtgatacacgtaagcgtattaattttgataaaaatacagtagttcatggtgaaaatagcacaagaacaattggttatcaaatgtttgtaagtgaccatttgatgtatcaaaataaaaatattaccaccaagtatggggatgtagttcgttcatcttatataaatgttggtcataaaattggtggttttactaaagcagatcagctaacattcaatgctaaatctttcggtcttatttcacaagaaaaccaaaccattggtcttgttcgttctaataatatccgtgatgagcaaatgagtgcgatcaaaattacttggaatggtagtgcatatcagattgatggatatgatctagttggtgctaaatttaaatataaacttcccgtaaaaaatggtagaaaagtaactcttaaattggaaaaccgtaatgttgttcattataatgaatggaagtctgaagcttcaattgaatatggtaaagttttcaatagttaccaagaagtttatacttttatttgtggatatggtgaatatcttaaagaacatggttggatttttgaagatgtaaatgatagtggtgctcaacaagattggaacactattgctaaagatttcgtgatctggagtcagaattctctagtaactggtgaatttatttcttgtaccccaagtgctgcaaacgctaaatttggggcagactttggttcagtacaatctattacgcaaaataatggtggtgtatggtcattacttgatgataataaccaaggtattcgccaatatgaaattgaaacttctcgtattggaaatatcttcactgttagaactttagaatctaataaacgcattgcattgattcgtttaagtttgtgttcatatgaacatgctgttatttttgatgataaaactatttttggtgattacatttatcagccaacatatggttctattcaagaactaattaaaatgtatggatatattactggttcatggactggtcgcctacaagctcctggatttattatcttggaagctggaacactaccatcatttgaaaaattagtgtcggatttccaacattattatgatagtgaaactccagtaagtgttgtacaattacaagagttgtcaaaccatttgattggttatcaatctcgtgattatctacagcgtatgattagtagtgatgttagtcgtgttgatttctataaaggattcattcacgataaaggtactaaccaagttttagaacgtgtacttcgtgtttctaaatcatatgacactgatgaatataaagcattacaagaatgggcatttaaaattggtacatatggtaatattgatggtaagaaaaaccttcaatttaaactaatcaatgaccaatttaaacaacaacctcaaatggtttcttttgatgtaaatgcaacttcaaatggtaatggtaatcatattgtatacttcggtgagcagggtaaagatcctcgttggattacacgtccaaatggtaagttctcattcccaatgcgtagtggaagaagtgaaaatatccaacttccagatattggtccagtaacattggatgaagtatcgtacacaacaaaagatttcagtactgcatataatgaccgcataacttatactaatggtaaaggtgaaaatcctgaatctgtgtggatgtttaaagacggtaatggtttgtggaacatttttgaattggttgatactaatgtgcaaatggtttctataacacctattgaaaataccgatgtgtatgctgaacaattttgtaaagtaactttaactgataatgtaccacttgaagatggtgattattattattttgttgatgaaactaactttatgccagatactttaacagtagaaagtcaatattatactgctggttctgatcctaaagttatggtagttccatttgacacttctattgatattgaatttactgatccagatacacgtccacgtttgtatcgttatgtatcacgttttgccagtactgatgaacgtcaagcttacattgacaagaaatatagttttaaagcaccacaaagtactttatttgatcgtccaacgacatatgatgaacgtactaacattactgagctatatctaaacgtttatgacccaattaatggtgttattccaggtgcggctatgcaaaacgtaacatatacttcaccagttgatcctgcacagtataatagtaatggagagttaatccaggcttggggtgctgataaagttggtcaagtatggtggaacactagcactgcattttatttggattatactcgtgcaatttatgacgcagacggtaatgttgacattgatgcaaccaatgaatacaaacgttacaactggggtcgtttattaccacatagtacaattgatgtgttagagtgggtttgttcaccagttgagccatataactgggacaaatactgtaaagatgttgctaagaaaaacaaaaataatactatgtatctaccaagtggaactgcacttgaagataattatagtacatttttggaatatgatagttcaactgatagttatgtgacaaaatactatttctgggtacgtgatacaatttatgtaccaccactacataccagaacaaaatcatgtactgacattgctcgtattattaaagatccaacacagctaaacattccttggttcgctccaatcaatgaaaactcgtttattcttagtaatatgcaatttaaagtgaatgatgataccagtattttaactgtttcttattacatggatagtactgaagttgttaaacatgaccagtatcaactatgtaaagaaggtgacagctataactttaacccactaatttgggattcaatgtggaactcactaattggtcaagaaacaactgaatcaggttctgtgattaatttattatatccagatgttgataacggtttaggttcaaacaaaacttggttccaaaatgttatagaagctcgtagaaactttgtagaaagtgctaataattattataggtcacaaaacataaccactaatagtgttgttatggaagatgtgtttaatgttaaaaccactgaagttaacccgaatgaagtttctttccgtgtattgtcttacaataatgaattagttattgcagttgaaagtgataaatttaaagaaaatgacgctgttattttaagtactagtggatatctaccaaatccattaacttctagtgctgtttattttattcacttcgacgaaaatggatatattcagttaatgaatagtccagcaaacgcgggtagtgttgttactataacgttagagaacaaaggtgagggacaacataaaatgattaaacaatctgattatgttgaatcactaggaacttcattggacatgactcagtactggtcatatgctgattggtatgatgttgggtatgatagtaacacgacttatactcaagagtcaagcttagaagatgctaatactaaaaactaccaagttggcgatattatcagagttaccgatagtgaaaacatttggacattgtatattaaatcacaatcacgcgattcaatttattggaaagcgattggtcgtgaaaacagtacagttgaactcaatgatatgctttacgcagattatagtgttcataatgataatggttcactaagcaatcgtgaaatcaacgttcgtaaagcactagctttactcaaaaattctttcgatttacatcaaagcgaaattgtttttgatatggtcaaatatgtacatgttgaacaaagtgttgtggattgggtatttaaaacatcatatatctatattgttggtttggaacaatcattagttcaaaactattcaaacgataatttgattaatcaaattgttgaatattttgaagaagttaaaccttatagaactaaaattcgttcacaaatagagcaaaagacatctgatgatgatttaataaaaggtctatgtaatgatttagatcctaatggatatattttcgttgacggttcttggatcaaaactgaaaaagatatttgggattatgagtacgctcaatttaatgaaattacccaaaaatgggaacaggtaggttcactaccaagtgatttcgttacaccaaatagaagattccaagaaattgatattattatgcattatgataatattcagtgtaaaccaaatgaagatttggcaagcataaatgaattagtaagtgttaataacaaatatcaatccaatgaaaaggatgctgttagtaactatgaattacaacgttatatatattctttcccagaatatagtgaagaaactttcgatcttcttattgcttatcaaatgcaaatctactatccagaattggatgtaacactaggaacagcatatggcgttaaccagtggtataaagaccatgcggaagatttagaagcaactgatgaatttactgctacattggagcgtgtttataaagaatcaacgcagaacgatatgtttactgaccttagacaatatgttcagtataacacattggcaaaccgtttgaaactttataaagatataagtgatgagaaaattcacgatgaagttggttgtggatttagtggacttacttataatgacaatcctagtactagacttccattaggcttttcttctagtaatgattataactatggatattttgaaataagcagtgaactgtatcaaaaatatatttcattaattaaagataaaaatcctgacgcatcagactatgaagtaaaagttaaacttgaagttgagtatggtgtatatgtttatcgttatgatgaagtcggtggtgatacccgtttctatactgatgctattcacgtattagcaggtatgagagggttattcgacaaagacgctactgataagtacgaaaaagctgaagagattcttagtaaaaccccaattgatatctatgcaattacaatgattccacgaaaatatgtttacttaaatgttaacggtgtatatcaaagtatacctgatgaacaaagtattgatgatttcatggaagattattttatcacaaatggtgaaatgattgaactagctgaaataaatctagatgatttaccactagatcaaaataacccaatgtattcagattatcaatatatacttgatagtattactgaagctaagtacttcaatgatatgaatgcatttgataacctagcattagaatctcaaacttcttcaataaaatgggaagttaaagatgatgaagttgatccttatattgtggatatatctgacataaacccttctgggcgtgatgttggtcaaattagatttacagttgatggatatgggtttgacaatgtatctcttgtacaattacgtgataacagcagatatcaaactgaaggtatggcaattatcaatccatataaacatacagaagcaattgttagtattccttcatatgctaagattgaaaatgatattaataaaacaacatcgaagtttgatgaaaaatatttctatcgtgtgagatctattaatagcttaactgaagcagaaatagttgacaatgacctatctgatggtgataaggtgatgattttcactcctgatggtgaagattttgtgagatatcaaaatcacacatgggaaacaatcttgcgtgtatctaacatcaaaaacaatacaactccgatcctattcactgtaagaaatacaggtaaagaaacgattgaattgattgatgagagtactggtgcagttctccgttatgataatatcactcttgcacaacaaaatgagccagtacagcctcttgcattgaacattgttcgtgttagaacatttgctgacccagaatttgtgaagaatggtatcaaattgtacgaacaaaatagaaattacacaattgatgtaattaattatgatgttttctacgatactactttaaatggtggtaagtacaatgacggaataacaccagatgacgttgacgtttggataatctctaacgaaatatttgatgttgatggaattactatcgacaacggttataacctaccaattactggtgcgggagttcttagtgaattagcaagaactaaaatgactgatagtttagaaatcaacgttattgaatatgattcaagtgttattcaaccgtttagaaataatgaaggtatatgggtttatggatatccaatggttgacggtatgtacatcggtgttgttggtggcacggttactaacatcacaaccattagtgaagaaaatacaacctatgtttctcaacctaaatcaataagtccttatagtattagaaataatgttttatccggttctgccgcgaacatgaatgatattatatcgattggatatgaaaaagttgaagttagaaatgcaaataatttactccgtggagtaatgtatagtgcagaacatgattttaaacttaatactacatattcattcaatggaattaatttaggtaattatgatatgttaaaacgttacacacaaaatagttacactatagatctttcagtatacactgatagtctacaagttagtggtaatgatattaaaaatatattattagttaagtaataaaaaaggagagcatattgctctccttttctttttttatgccagtgctttatctacagctttggaacgtttcggtttaataccgattttaccatcaataacatcaaatgtaatgttaccaccattcacaagtgaaccacacaacatttctttagctagtggtacacgaatgttttgttcaatggtacgtttcattggacgtgcacccatgccaacttttaccccatttttcgcaagccattcacgtgcagcttttgtcaatgtaactttaacattgcggtctttgacttgttcattcaaactgcccatgaacttatcaatgatgctgtcaatagcttcactgcttaggtctttaaacgtaacgatactatcaatacggttaataaactctggtggcaagaatgctttaattgccttgtcttgtgcagtatcactaccgctcataccaatgctacgcttcgttgaatctgccgcaccaaggtttgtagtcataataacagttacgttattaaaatatacagttttaccttgtgaaccagtcaggcgaccttcatccaaaacctgtaggaaggttagtagtactttacgatctgctttttcaatttcatcaagtaacagtactgcattagggaactgctcaattttatccaacagtaaaccgttaccagaatcatgaccaacataacctggaggtgaaccaattagtttagaaacagtatgttcttgagaaaattctgacatatcaaagcgaatcagttccgcaccagttgcatctgctaatgctttggtaatttctgttttaccagtaccagatggtccaacaaacataaatgcaccctgaacactagatttgtcacgcagtcctgcacgagctaccatcacgttatcaactaatttttgaatagcttcctcttgaccatatacacgtgagcgtagtgcatctggtagattacgcatacgatcactttcagtacatgcaaccacgttgatatccaaattggcaataccagcaacaacttcttgaatcaaattggcagtaataagcttactattgttgtcacgtgaacgaacttttgcagcagcagcgtccattagatcaattgctttatctgggaagtgcttattcttcaggaatttatcactgagagaaattacagcatccattgcatcagttgtgaactcaacattatggaatttttcataagttggtttcaaaccattaacaattgcacgagtttcatcaattgacggctcaactacatcaattttcataaaacgacgagttaatgcactatctttctcgatatttttacgatattcatcatatgttgttgcaccaattacacgaatctcaccacgtgaaagtgctggcttaagcatattgctcatgtccatagaaccattacttgcggaaccagccccaaccataatatgaatttcatcaatgaaaacaatagtattttcacgtttctttagttcttttagcaaattgtcgatgcgttcttcaaactcaccacgatacttagtaccagcagtcaatgcaccaacatttagtgaaagaatttcaacgtctttcaggtgttcaggtacgttgccgtcagcaatagcttgtgcaagaccgtcgatgatttgtgttttacctacaccagcttcaccagtaagaatagcattctttttggttttgcgagcaagagtctcaatcaatgcagacaattctttctggcgaccaatcataggatctagtttgccttctttggcaagagcagttagattcgttgtatagtcttccaaacctttttgtttagatgattgctgctgttgggccacttttttatctccaatcggttcgtcattaatactttgtaagttgatacccttatcaagtgactcaacgtgtttttgcaatgcacgtgcagcttcagtacagctaacaccttcttctttcaacgcagcttctagtgctgtgttagggaaagacagacattcgaatagaacaaaatatgcatcaatcgaaaaatcatcactttttagttgttcaataactgattttttagaaagctcatgtacaacgcgattcactagaagtgaagtgcgattcgcgtcttcatctttaacactttttggtgcatgtggaactgttgtatttttaagatagttcatcaggcggttgtgcagtttgtctgcatcaatgttcatatcttcaaatacgttcttgatgctatcaatagtcagtactgtggcacttacgtggtcaatagtcaagaatgtatgacctagagatgttgccagttcgtcgctttttttgaacaattgagtaagattcatgtattctcctatgtgattcacgtcactctaattaataaacattatatcacattcttacggtttgtctacaaggtaaataaagatatacccgatttattttggagacaatcatgacatatagaatgtggaaaaaaggtagaaccaatgattacaagttcattgattctgccattgctgaacaatacaacattggtggagttgacatgtggctttatgcatatgtcggtccaaaacaagttgctgacaacactgacttatcctatggaggtgattatacatcttcaggatcagttgtgtcaagtattggcgatttaatttttggtgacacaccaaacagaaactacaaccttgaagctatcacacttagttgtgtctatcaagttcaagaagcaactccagacttgaaaatcccaggattgttctttaatttcaacactatggacatcacaatccattataatacaatgatgcagcgtttaggtagaaaaatcatgccaggggatgtgatagaactaccaaatttacgtgattttgatgtattgggtaaagatacaggtctaaaccgcttctatgtcgtccaagatgcatttcgtacatctgagggatactcggttacgtggcaacatcacatttataaacttagagttaaaccgctaaccgactcacctgagtactccgatttactcggtaacaataattatcctgataatccagatgaccctaataatggtaatggaaataccgatgatggttcgtcggaaaacagtaactatggcaatgaaatggatatcatgaaccgtatcatcatgcaagctgatgatgaagtaccctatattcattatacaaatgaacatttgtatgatgatcgacctgatacagtagatttatcaaaatatatgcttaacggttatgattttccagaagaacctgccgatggaatgtatttttgaaaaaaacatacccagtactcaaagagtttgttaatgatacatggatttctgtggaagtcaagcgtggaaccatctttcccagaaaaccaatggatggtgacttcttctttaaagaaaatgacgcagatgtgacaggttatacgttgtatcaatatgataaaagtgctaaaaaatggttaaattgtgatgtagaatatactaccagtgatgttccacccgaagatgtggaagatttttgtattttttataaagaaccacacatttatcagtataatgatgacaagtggggggaaccaaaggtaacttatgtcaatgaaccattcacgtccaattgtgtatatggtaatattgattcccaacaagattatcgtcctaaaattccaccagcacgaggtactgtccctgaaggaaatatgttcccaactgatgcagtagatggtgactatttctatcgcaccgattatactccagttacgttatgggaattcaatgcaactaagaattcatgggttatttttgattatggtggaagaaaaccgtgggaaggtgcagacttagcacttacacagtttgtaaatagtgataacaaagttccattacatgacgcagttaaacctaatactgtttatcgcatacataaggacacagaatgaaaatagattattattatgacggtcaatttcgcagagtactgaaacatcttatcagagtttttggtgaatttcaagtacaaaatggtgttgatgctaatggaaacccaaaatacaaaaaggttccatgtcgctatgccgatatttcaagaatggcagcagcaattataaatgggaatagtgaaaatgttctcccatcagcacctataatgaccataagtgttaatcaactaaagttggatcgtaaaaatattcgttctaatgccaacgaaactatagtaatggggtctaacaagtcccctgctattaatgagtacacaaaagatcttgacacacaatacaaaattgtaagacataacccagtaccttggacttttacgtttgatttgaatatttgggtaactcaaactcaaactaaaatggaattattcgaacaaatctcaactttgtttgcacctagtatacaacttcaattatctgataacccgttagattggacatcgcttagtgatgttgaactaatagattgtcagttttctactcgtggttttccacaaggaactgacccagatttggatataatggttttaacatttgaaacgacaatatggttttctttaccagctattgttgaaaaaccaaaattaattcaacagattactacaaatattaaaggtgctcgtgacgaatttgattttgaaatgggaaattattcagatataataacagatgtttttacaccaaagaacttatgtattaaagttgaagaaattactaattccaagtataatttacctgatacataccaacttaccttggttagccaatcgctatctgcggtttctcccaacggtggaatatattcatgggaaaaatatcttaaatatctagaaccaaattttgatgataaaaaagtagggattaaatttcaacaatctattgaagaagacaacccactaaaaggtcatatagcgtcgtatggtgaaaatgaagatgccaacaaaattatagtacagcttgataatacaaattatactgttgattacactatacatgggtttgtgcagaaagattcagtactttcaaatgcattacctgaacaatattatgtaaataacagtatacataacatcatttataaagaaaccgaaatcccatcaaattatttgtttaaaattacaaatgatggtgcacaattaattgaaccatctactgtacgaaattacatttataataaagaagacaatggttattatagatataatgacaaatttaaatggcataaaagtatcatgcctgtgtatcgtcagggatattggaaaataactttcactgacaaataaaggaggtgttgttatgaatgaagcggttggtgctatatttttatcaaaaagtactggacatatgatgttaaacttgcgttctgaaagaagtacctattctaacaactgggcatttgttggtggaaagcttgaacataacgaaacaccattacaaggtctgatgagagaaattaaagaagagttgggcaactcaatacctaacattattgatattataccgtttgatgtattttgtacaaaaaatggtaaatttaaatattattcatttgttattgtagttgagaatgaatttgtaccaactttaaatcatgaaagctctggttatgcttgggttagaattggttcttggcctaaaccattacaccctggtgctaaaaatactttacttaacacaaacttaatgaaagatttttactcactatgggaaagtatacgtgaaggtacacagtttgtcaacagtttaccatatagatattaaaacaaaaaggagccgtgtggctcctttttttatactccaataatcggaatacctgtaatatttaacaacacggatgcttgtagtttaacggattcaccagcagttagattactaatgctaccatcaactcgaaaacctaaatttttatttgagtttagagaattgataacccaattttcataatcagctttagatgttccattaggatttgggatagatggatctacaccattaataacaatatttacgtcccagtttgggcgactactggtaataacatcttttatggattctaattgtgtaatcctacgtgggtctggcatttgacttgccccaaccgaaccaggaacaaaagttccttgattatctacatagaattgcccttttataaaaaaggtttttgaattatagggaagagaaactatctcaccagaagaatcatttacttctctaatcataatttttaattcatagaaatagttgctaccaaattcaaagacaccagtaccattagttaatgttgtccagttatttgtatctacttgtgaagtaccacctaagttaaaatacgcaattggtttagtactgttactttgtgtaaactctatgtatttttttccattatcatagttaatatctaataatgatgtatattctttgttttctggtcgagatgtttgaatttcacgccattctttgtttttcatcaaaacacgaagtgaatcaccattgctggttaataccatacgacccataacactgttttcaccatctggtacagtgttgaatacagttatcattggaatagaagcccattccgcttcacttaccatatctgctggttgtctagcattatccactaatgatattaataactcaccagtacttccagtatttcgataccaaagttgaccatttacgttaccacgtggtgctgaagctgaactgaagttttcaactaaatgtaaaaagttttcattccatgcttgaccataacttactttgtttctaccaactaaatttaatggaactgggttactacctggctgatttggacctaaaataacgttatttggaatggtagcataaacactaccattacttcgataaattgtatagttaacactcattatatgaccccattattgtagttgtacacgcacagtgtatttaatttgcaaaacacggtttgcacttttttcaactgggtggaaaataatatgtgttaaaggaataccactatcaccatcggtgtataatcccaattcatcaaacacatatgttccgtccatgcttgtccctgaactcacaccttgatctgatggttcacctaaccctagagtacaaatacatacaatatcagtataggactgacctggtatatgtacagttgtaatattattgtattgtgaatcaatacctgccgtaattcttgggttgatttttttcaaatatgtttgtgaatacaaaccaccaaatgatgtaacacgtggttttttataagtaacacgcccagtacttaaaactactgtaccaccattaccaaaacgcatctcgctaatagaaccaataggaataccagtactgtcttgattatatgctaacgcattagcaatggcagtactcatattttcagggtgaatagcgttagatttatctaaaacgattttttgatttgatggatcagtaacgtcagtaattaggacatgacctttaacaaatagttttggttgttctgtttctaatttcatttctaatccttagtagttaattaaaatttgttctaacttcccagctaaacttttttggacatctgatggatacttactaatataatcacggtctataccaactttaaggtaagtaaaattaccagttactgtttcagcaaatgttccggtagttccttgttgtctaattaaatccccaccatttggatttaaaataaccatatcagtaaattcaagataataattacaactttcagtgaatttaattggaaaccaatcatcatcagtaggattactagctaatgtagctaacacataaattctaccaataaaattacgtagtgtaaatgaaatcgtatgtaaacctgtagtacagccatagtagccaccacttgctagtggtaacgtttgttcattccagtgataatccaagttagctggataccagctatcagattcaggaaaatcttgccatgaaccatcttttgtttttcttctgaagagaaagtcttttgatcttaatgccattgtttaagcccttttagtagtgaactttcatttatttattaatgataacgaaatgtattttgtactgataaatattggtatatgacattaactcatacaagggaaatattatgacaatttcatttaatggttcatgtaataactccggcatcaaaagtctagttattaatggtgctgggcatttaattgtaacctatgcagataacacaattcaagatttaggtcttgttgtaggacagaatggcgagaatggtaaaaacttttatcctaatgagattggttttgaaattccttccgaacaatttaaagttggtgaaccacttgggtggtgctacttaagcttggctaacaacaccagtactctatactttaaatcaaacgatgcacaagatccgacaagtacatggattagtgttgagtttggtaaaggtgatactggtgaagcgggtaagccgttccacattgatagtgctgggactactttcccaacaactggtctttttaataactatacattttataatactcaagatggtaagctttatttctatcaaagtgtaactgccacttggagtgatggtatccctttccgtggtgaacaaggtccgcgtggtcgtttccatattgatagtagtggtgatcaatttccaagtattgaaaatcttccagttgattattgtttttataacaacactgatggaaaactatattatgttgatgaagtaactacaactacccctccttcaaaagagtggagtgatggtattctattccgtggtaaagaaggtcagcaaggtattcaaggtatacaaggcgaaccaggtgcaccaggtaaagatacaatttctattagaaatacaatagatagctcatggactaacgcactattagttattggtacgtgtcctgctggatatgtagtttctaatattgatgtaaacgttatacaaccttattctcttcctgtaactgatatgtttgtacgttttggtggtgaagcacaagaagatattggtgggactgtaattgcaccaacttcctactttgatatcaatcgtcagatgcgttttattgttaatgaaactaatcatgcagcatccgatgttgatgaaattatttcatgtgtattcaacgattctgttaacaacagtccttatggaaaaatggaaattatttgtactctttcatggcaagctcctatccaaccgattcaagataatatttaagggaggatgtcataatggcagtattttctaattttgaaggaactatgcagcccaaattcatattggggaaaaaaggtgcttcaataaattttatcaatgattcagtttctataaaagattatctaggagaacagttcctaccactgaaggtaggaacttcatctgatcctaattcagcagttaacgtaaaatatcttgaagataaccctaatgcattatttggtgttgtaccacctaccgatgatataggaaagaacaataatacgtattttcaaattgatgaagatggtattgttgatatttttgcaaaaagcaatggtacatgggtaaaatcattatacattaataaaaaagttctatccagtaaaaatggtggagatttcatcggacttattactggaggtacagttcaacaggcacagttttatataacaccagaagaatttggtgctggtgaaaatggtggtgatttgagaacgtatataactcgtgcagtgtatgttgtaaacaacgtatatagaattgatattgcagatcctatcataacagcaactgctgctggtgcagcattaaaagccgcccaacccgtaacttacataaccctaccataaaggagattatattaaaatggcagttttttctaatttagaaggaaccatgaagaagtccttcattcttgggaagaatggtgcacagattaccacaaatggtagtgttgtgcaaattcaaaactactcaggaacacaacttcttccaatttcagcaggtgaaccaactgcaaacacacacttggttacattgggatatttaaacgcacacagtggtggtggtagttctggtatcttacgtggaacaacagcaccatccgattctattggtctagatggtgacgtttactttttggttgatagtactaatgttcttcaaatttatattaaagatcttggtatttggaaaccatttaaaggtagctcaccgggaactgatagctcatatgtaactactgaaatagttcctgtttctgcatttacattagtaccagatactactgatcattatacttacacactaccagaatcagttcatggtagaggttctgatattatgattcaactacaaggtgacccaggtaatgttgcattggaatcagtattccaaaccacagtaacagttagtggtattggggatataacaattgatgtgattggtcaaatcacagattatgcaagtgttaaagtaaacattataggagcaacaacaatgacagtaccttatagtaaattagtaaaccaagccgattgggtttctagtgctggtgatttcacaatcactattccagcatccgaacacaatcaaaccccagataatttgtatatttcaatttatgcaaataaaacacctggaagtgttgcgtcatctccattcgagttggtagtgactgatacacaaattagtagtactggtgatgtaatcttcacttctgatatttctttcagtggtaagattgtcatctccggtaagtaacaaattaaccaggcttgttctaaataagtctggttttttattatatttgcttttgtcaaataatgtattaattgttggataacagcataataaaactaaatatatacatattaacaaggttataatggagggtataaatgtactcaataaaaactgacttagatattactggtgctggtacggttggtaaggatcttttagtcaaaggaaatgctgttttcaataataacctaactgtaaatggtactgtaacttttgcaaatgcaacttttactgccattgaatcatcaactgccaacattacatctactttagatgttggtggcaaagcaacactttctggtggtcttggtgttgagggtaatactacaatcggtagtgcagttgtcgggtctgatacagcaacaattaattcaaacgctacctttaacggtactgtatcagttggttctgattttacacaaactgctggtacaaccactctacaagcaactaaagttaaaaacttagaagttgctgaaacaacagcatttaaaggtaatattactgctgatgttggtactactgctgcatttgataaaattactgctaataccgcagaaattacaaatgtaagcaccaccgatattagtagtactggtactgctacatttaaagatgtaactattagtggtacacttggtggacaatttaatctatcagatttgaatgcagtaacattgaacgtttctggtgcatctaaccaacaaggtgcagtaacttttggtgcaaacgtaactggtattaacagtactgctacttttaaagacattcgtattggttctaactctgaatctcaaaccttcagattaagcttcccttacactgctcctggtaaacgcccaactgttattctacaaaacgaaattcagtccgagctaatgtcacctgcaaacttgacagtattgacctctgcttcttttggtaatgcgtcattatcttcttatggtattactggtaatggtctaaacaaattggattatctaacagtttctggtaacaacacacaatctccagacaccccactattggaagttcaaaagggtaaaaccaaagttgctgactttgaagttactggtacagcaactattccaaatattgaaagtacaggaaccgcaaactttaataacattaacgtttctggtctactaggtggtacattccaacttgacgatattaatgcagtttcattgaatgttactggtacatcttcactaactggtgcagtaactttaggttcaaatatcactggctttaatagtactgcttctttcaaatccattagcttgggtcaaaacagtcaagatgcagcagttaaattaggatttggatatacagcaccaggccaacgcccaactgttattttacctaacgaagttcaatcagaagttgtttcacctgcaacattgaatgttctaaaaaccgcaacttttggtaatgcttcactatctacctatggtattactggtaacggtcttaacaaactagattacctaaccattacaggtaacgcaactcaagaccctagtacaccattcctacaagttggtggtaaagcaattcttaatgatgtcgattttactggtacagtaactggcctaactgttgatgtaagtgggcaggatctaacaccaaactcagttattgctgctgcaaatattaaaggtgcaacacttgaaagtactggtaacactactgtgggtgctaaactaactgttactggtgatattgctggtacaactgcaactctttctggtgcattatctgctggttcaataagttctggtgttattactggtacaacttcagtttcagcaccaacaattagtgcatctactgaagtaactgctcctactatcactgctagtgggactttaagtggtcaaactattaacggaactaatattagtgcaacaactcttactgcaccaactattagtggtaatacaaactttacagaaaatgttgatattactggcaacctaaccgttactggcacagtaacgccaggtacgattgatttgagcacaactgatgtaagtgcgaaatctattactactaccgctggtgcaaatattggtggtgatcttgtggttcaaggttcttttgatttatcatcagcagacattagcgttaaatcactaactgcttctggtattgttaaaagtaatgatcttgttaatgctaacgtacttccagtacttaatagtactactgcaacaattaatactgttaatgcaactgaacttgcggtaacaggtccatccaatctagcatctgttcgtacaagtgctgatgttgtagtcggaacaactttaaatgtaagtggtgaaacaacaactgcatctctagttactccatctatttccaatgcaactggtgttacaattggtaataatacttctatcactggtgacttaactgttagtggtgctgtgattcctggatctatcgacctagcatcaactgatgttaacgctaaatcaatcacaacaactgctggtgcaacagttggtggaaacttaaccgttaacggtacagtagacctaactgctgctgatgtaacagttaaatctctaaccagtactggtgcaatcgttagtaatgaatcaactattagtagtgttctacctaaactacaaagtactgatgcgacaattgcaactctaggttctactactgcgaatattactaatttgaatgtaactggtgcaacttctgttgctgatgtaacatcttctggtaaagttacagcagtttctattgaagttccaaccattggtaatactgcgggtgtatctattgctaataatacatctattactggtgacctaacagtttctggtacagtaacaccaggtgctattgatttaacaacaactgatgttaacgctaaatcaatcacaacaactgctggtgcaaatattggtggtgaccttgttgtttctggtactgtagacctatctgctgctgatgtatcagtaaaatcgctaacaagtgctggaatcatcactgttagtagtgctgaaggtgttaacctactaccaaaagtacaaagtactgatattactgcaactacagtaaatgcaacaactgcggttgtttcaggtgatgtatctgctgcaaatgcaaatatcgctggtgctgttaatggtgcgtctgcaacactatctggtgttggtactgcacttaacgttactaataatgcaactgtcggtggtgcacttactgttggttctattacttcagcggcagaaaatgtatccattactaaaaatacggctatcactggtaatttagcagtatctgggactctcactgctggtgttattgatttgagcactactgatgtttctgtaaaaactttaacttctcttggtgacgcaactgttcgtggtaacttaactgttgatggttctattgacctaagttctgcaaacatcgtcggtgtaacactagaaagtactggctccactacagtaggtactgatttgatactaactactggtaacattacaggtagtccatctatttctggtaacttaggtgtaactggcactacaactttaactggtgcaacaacagtttcaaatacattgaatactgctggtaaactaaccgttaatgctggtggaattcaggttgttgcaggtgatatacaagttgattctggaactattactgctcctagtgctaatatttctggtagttcaacacttaatagtgctactgtaaccactacactcgatgttactggtgctgcaagtatgaatggtggtttaactgcttctaccttggatgtaacaggtgatagtacagtacaaaaactaactgttaaaggtgtatttgttcctgaaggtggtttggacctttccggtgctgatcttaacgttaatagcgtaactgctgcaaccacattaagtgttactggtgctagtactctaactggtggcgtttccacttcaacagtatctgcatccggtaaggtaacctcacaagaactaagtactggtacattggatgtaaccacaaatggaactgttggaggaactttaggtgtaactggtaaagcaacagtggggtcactagattcaggtgcgatctctgctacatctggcacatttagtactactctggatgtaactggtgcagcaacctttggtaataatgttaccattactggcacattaacaccaggtgcattggatttaactagtactgatgtagttgctaacagtctttctgttgcatcaaccctacattcagatggcaatgcaacaattggtggtacattaggtgtaactaatgcagtaactgctccatcaatcgctcttaatggtgaaggtactgcgttggcagttactaataacgcaacaattggtggtacattaggtgtaactagtaaagcaactgttggctcactagattcaggtgcaatatctgccacatctggcacatttagtactacactggatgtaactggagcagcaacatttggtaacaatgttaacattactggcacattaacaccaggtgcattggatttaactagtactgatgtagttgctaacagtctttctgtagctacaactctacattcaaatggtaacgcaaccattggtggtacattaggcgtaactggtgcagcgactgctccatctatcacccttaacggtgaaggaacagctttggcagttactaataacgcaaccgtaggtggtacattaggtgtagttggtgcagcaactttaggttcactaacaacatctggtgcagttaaaactggtgctaacgttgtaattggtacaaaaattggtgatcaaccagaaacagttcagattttccctaacacttacatcgcaggttccttgcgtgtagacggtggtatcaacgctgatatcgatgttagtggtcaaactatcgaaccatatgcggttgttgctgctgatactattagtgcagcaggtaatatcacatctggtgcagaattgatttctaaatctgcaactattggtgatgttggttcacaaaacaacaacttaaccatcaatggtaacgtagttaacaatggtaactttacagtaactggtgttctaaacgcaacgctaaaccaagctaactctgatgtggctgttaaatctttaactgcaactaacagtgttgctgctggtactagtattaccgcaggaacaagcattactgcaactggtttactaaaaggtaacactcttgaagtaactactactggttcattcggcggtgcagttactatgtcaagtggtgcaaatatcacaggaactgttggtattacttctggtaacctaactgtcggtggtgatatttctgcaactggtactgctacccttgctgctacttctgtaactacaattactacttctggtgctgctactcttgctagtgcatctgtaactggtgcagcaaccgtaggtggtactttaactgttactggtttaatgactgcaaatggtagtgttgttctaggtgacgctgctgctgatacattaactgttaatgcaacatcttctttcaaagaaaatgctgtgtttgacaaaaatgtaacagttactggtcaactatcaactactaatgctaacctaaccactacaacagtaactactaaaaaatatgatgttattcctaatcaagtaacttcttctgttattgcaccaactggtacttggactcctgatggtactagcaacgtatactttatcacccttgatcgagatacaactctagcaccaatcactggcctaatcggtggtggtaaagcatcttcagtatacatttatgtgaaacaagatgcaactggtaacagaaactttactactgatggtacttatgcggttgttgatggtactctaaacaaaactgcaaactctgtgaccatttaccaaatcatttatgatggtgtaagtccagttgtagatatgtttattgcacaacgtacagcttaataattataataataaaggtgtcactcttttgggtgacaccatcataacaagtgaggtagttatatgttcacatatgtgaaaggaaattcaaaagaaaattatgaattgggtagcattatttctaacccaattggtgtaaaaggattgaaagaacgtccaggtgctacaccagaagatccacaaacctatcgttatctttatagtgatattagaactctttatggtatttcaagtaaagatggttctccagtggaacctaatgatgctgttagaaaagaagaaggtttttggtggttagtgtataaaaatattggcaatgttaatgctattgaacaaccattggagtttattaagttaaaagatgataatcaaccagttgttgaatttattgaagaagctacatcagagtataaagcactaacagtactgaaaacataccattacgttgatatgaatattactgatgtgaaatatgatttaaaatccagaactgtagaagaacgtggtgaacgtattaatcgtggttatttgtttaaagaacaacgttatagtactgatctagctggtcgtcaaatgttacttaactattatactcaagtaacttctggtgctgaaactgtctctatatttctcgatgatgcaatagttaaactatctgctgctgaaatgacacaactatatactgaagcatttgctatggtagaacagttgtttgcagaatgtgatcgtcagtgtgctgcaattgatgcagttgatgatttagatcctgatgcaatttataaagcacaacaagctgcaacttgggcatatgaaggtattgaaattcctgaacgtactcgttaatattataaggtcaactatggttggccttttcttttaactaaaataaatacatcatatataatctattctgaggaaatatttaatgagtataaatcgaattagaggtgatggtggtgttatcatagatagtaaatctttttagagttaccgaaagcaccatctaaagaaaccgctgatgtaatacgttcagggatgattaggtacaataaagaatggaaatcatttgaaggtgttttggattttgaagatggtacaatggcatatcgtcgttttgcaaacttagatgccaatggcaaactccttacttcacaattaccagattcggtaacaagtggtttgcagttcgtaggtacatataatccaatccctgacgacatcgatccacctttggcacaaacaccgctccctgcaccttcagcatcacttaatggtgattattatgttgttcgtggtattatggatgctgcacaagcacactttgaagcaaataacccacaatccactccagttacatttacaccaaccaacccaactggtcagggaaactggattgaaatcctttattatgttgattcaaatccaaatgtttcaggtgcaaaacttgtcacttatgcatttgctagaattattactgcttccatacctagtactggtcatgatggtcttaaaaatttagcaacagatgctgacttaaccaaaccatttgcttcaggcgttccaatgaaccaaaccgcactatcagatggtgattggatcattataactgaagataaaaacatacgtctacgccagtcaagaacaagcatttctgctgcttctgtattatatgacaatacagtaatgattgcaaaccatcgtcaatttagaacgaacgcaggaaccgtacaaacatccatagataacgttgtgattgaatgtttacgtagaactggtgattccatgtataatgatggaacaagcggctcagggcgttttggtgtggtgtatggtagtgcagcagcaccagcattgacatttaataacaatccatttgatccaaccaataacccaggtaatgatcctgcaaaatggtcagacgctaatactggtatgtttcatccagcagatgatgcaattggtttcagtactgcgggaactgaacgtattagaattaataattcaacattaacattataccaaacaacttcaaccccagcatcaaccccagtactaagatttgataatgcaaccaatactaatgttggactaagtgctagtagtaatattatttcatttagttcaatgaataaagtacaagttgaatttaaaaatggtgaaagtgcgtttcatggtaatattgtggttgatggtacaagcacattgactggtgatacatcagctagtaatatcactgctagtggtaatttgaacattcaaggtaataccatattaggcgatgctgcttcagatacaattacagttaatggagttagtacgtttacagcaaacactaatttcaatggaacaactaataaatttaaaaatataaatctattagctaatggtataattacattagaaagtactactaatcaaagtacaatccaattagttagttctgatttaaaactatcaatgggtaattatgctgatgtaagtatctatgataatggaactataagaacacgttttaatagatatggtatccaattaccagtactagcaactattgataactctgttggcgttgatggtatgattgcatactcaaataccgagcgtacttcaatgcaaaaagttcaaggtcaatgggttccgattggttcaggttcagtgagaaccgatgcttttaccatttcatcttgggtattaagtggtaactactacacccttactgtaacagcctcaaacatcgtcacagcagagatacaggaacaggttagtcctggtgtctatactcgtgttgaggtcgatagcgttacgtttaacggcactaacgtagtgtttagtataccttcaactcctgatgtacgtttcgacggaagaacattggtaacaattagataataaaaaaagggagaactaatgttctcccttttcgtttatacagccatcggtgctttaattgttggcattgggttataattcactaatttgaaagaatccattgtgaaatcttcaatattagtaattgtaggatcaagccacaattcaggtaattcacgaggttttcgctgtagttgttcttttacttgttcaacgtggtttttataaatgtgacaatcaccaccattccaaataaattcaccaacatctaaaccagtaatttgtgcaatcatatgagttagtagtgagtaactactaatattaaatggtacgcctaaaaatagatctgctgaacgttgatgtaaaatacagcttagttttccttgtacaacacagaactgtacaaagctatgacatggtggtaatgccatttcatctagttcaccaacgttccatgcacttagaatgtgacgacgaccgtatgggtcagcattgataccatcaataagttgctggagttggtcagttgttcttttcataacaacaccatgtgatccagtataatctaaaactttataacctttatcttttagtttttgtatttcatccgtacttgaactaaatttatagtcttcccattcacgccactgtttaccataaactggacctagttcgccattgctatatccaagtgaaacaccttgattaaggtagttatcagtccagattgttttcttttctggatcacgagtaccgtgcagtatttcacacaaacggcgttcatcatgggaaccttcaataaaccacaacagttcagaagtcattgctttccatgctagacgttttgtcgttactgctgggaatccttgtttaaggtcaaaacgcatttgttgaccgattaacttgattgtaccgacaccagtacggtcaacgctttctacaccttcatctagaattttttgatatagttcttgtagttgtttcattatacttccttgaaaaatgtaataaaatgttccatgtgtttttctgttgcattacgtgaacctatacccgtccagttaccgtagggagcaggaatagagtatgttttagtgaattctttcagtactgtatcgaaataaaatactgaacgtgaattcatatcataacaataaatttcaggattttcaactgaatccatatacatctgtactgcccatgcagtaccaccacttaccttagttggtgatgtgatatttgcaatacaatatactctttctgtattaagtatctgataactattccttgcaagtaagttgtaaacataagaaccaggctttggtacttttcgctgtaacgagtaacatgcaatgtttagttgatttaatatagaaatatcagatagaatattggatggtatttctaatatagtactttcatctacactatgctcatgacctttgaatgaaaaattaataacttcaaatccattattttttgcatagatagaaaaaaggcggtcagcacctgctgccccgccactaaaacatacattagataaaccttttattgcttcatctaattcattctttttcatattttattttgctttacgttctgcaaatagttgttttactttctcaatagctttagtctgtgaaataccttctggaatttctagataaattgttttactatctttcggttgttcaacaacttgtgtttgtggacgcaaacttggctctaaattatatgcacgttcataatgttctttagccagtttttcatatttttgtgcatcagtgagaagttgttctacaatagtagcttcttctactttagtgtccgcttcttgtggattgaatgggttaaagtcttttactttaccatcttcttgtacttttgcttgattttcatctaatgctttgtttagaacatcaagagaaattttattattaccaccagtgtgcatatcaatgtcacaagtacgaacgcgacgtagatgctgcatattgtgtagaacatctagcattttgcgtccatcgagataaccaattttatgcattacttcccacaaatcaatattagattgaccatgacccataacaatatcagttactgcgtgaacatatgcttctggtagtgaatcacgataaacaataaggcagtgttcaggatcatctggtagtgaacgccaaacaacaaaaacacgagaacctgtattacgcattacaccaacatgacgaatagctgccataattattctcctttatcttcttgagtttcactatcttgtgattcagcttcttctttagctgcatcttcttgtgctttaatatcttcaagagctacatttgcaaaagaaacaaatttagatacaactggagcaacctcaacgagttcttcaactttaaaggtgtttcgtgcaacagcagcttccatgatttttgcagcattgattaggtctagaagggttagttgaatttgattattttcttgttccattttaatactctccatgtatattggtacattaactattatatcatatttttataagttgtcccacttataaaagaagagaacggaaaattccgttctcattatttagtacttaactacgttgacgctttttatcagcttcatattcgtagtgtacagtctcaccaaatggtgcaactttatttggattactgtgaatcacgaacagtgttttacagtagtttggatcaccccatgactgccacggttcaccatcagtaaacattacaagctgtttaggcttgtagttgtcgttcttcatatgaacccatactgcttcaaagtcagtaccaccaccaccttttactggatattccagaatcttacgttcttcgccagttttgtaatcctttacagtataaacttcagtatcaaaagtcatgatacgaatcttaaactgtttgaattgtttagtgatgccaagaacttcactaatgaaatcacgaagcatatcttcagaaatagacccagaagcatctagtgcaatcgcaatatcaatatcatcatctggtttcatccctgggtaaattggattaccatagaatgaaccattagaaccaaaaccagcaccccatgaacggcgatttggattttgataagttgcatcagacttcaaccaactacgaagagtacgttgaagttttgaacgccagtcaatctttggttctttgaagttgttaatcatacgagcgatttctgctggtgtaccacctgcacgtgcagcattcatcattgctgttttgaaatcatccatataatcgcgtttttgttgttcactagaaccaccttcttgaccttcttgtggaacgtcatgttggtcaattgtagtaccttttggtttacccttaccatctttaatatcaccaaaagttccacgatttttaccttcaccttcaccaccaccgctttgtggttgtccttgtccttcaccctcttgcttttcttcttcttcttcaagaagaatgtaaatctcttctgcggtcataccttcatattttttatcatacaaccatgaactttggatttttccaattttctcacgaacgatgatttggttaatggcataatccgctgcacggttataacgttgtggatcacgcataccacgacgaaggaagtgatcgtaagcacagtgtaggatttcatgacaaattactgcaacaaggttttcatcagtcaaaccttcagtcatttcttttaattgttcgtctgtaacttcagggtgcttttcacgaatagcttcttcatattctttctttttagatgggtcttgaatacccattacaaattctacgttgtagaatagatgtttaccatccactgctagagtacgacaccatgtattattaggaactggacgtaaacgtgaagcgagtacaccaaagaatggtgcagttaacatcaaagatgtacgagccagaaccagacgttcttgacattctttctggagtgccggagatacttcattaaatctggaagtagatttgttatctgacatgtatatttcctcgtttagttaagataaaagaaggataccattaggcatccttcttgtcaacaactctttgttaattagccaagagagcgtgctttacgtacaagttcagagtacttagcgatgaaatctttaaacgctggtacatctttaatggaaatcgcaaccttatgaagcgtgatggtacgaattgccagtactgccagttctgcttgagttgcagagaagttatggtctaggaaggtgatgaagttgttacacagtttaccccattcttccactggtagacgttgttcttgcttctcattgaacaggtcgataattttataaaccaagttcagagtgataaagtagttcgcagaaatatccagcgttgcgtcgatttctttgatttcaccagacagaatagacatagtatctggtagtttagcaacgttctcaacgtactcaatgtattcagtcgcaacaccttcaccaacacgaccagcaatcattgcacggaacacttctttatcaattgtcttatttttcttgagatcttcgtagcgtgctactgcttcccatgaacgtggagaagtaccaccgctgtgagaaggatcttgtgggctaagtgtgttaaagtacttagaaccagtgttgttgatgaacgcaacagttgctgggttcaaacgttttgcaatcgcataatcgttaatccaatcttgatgataaggaatcatctcaatgtgagtcatacggtcacgcagtggtgtagcaagagagaacgttacaccgccatcagtttcacggttacctgctgcaagaatcagtgcagtcttaggtagcttcatctcaccaacacaacggtcgaggattagctgataagacgctgcctgaacaataggcattgcagagttaatttcgtcaaacagaataacacctttccaatcttcggacaatttcagtactttaggtgcagcccatactaccgcagtttcagctacataatcttttgcttcggcaagctcagattctttcagaagagaaccgtcagttttacggaaaagcttctctggtactggaataccgcgaaggtcacttggttcgatttgagacaaacggaaatcgataaagttagtatcttggtcgattagttttgcttcaaatgcagccagttcacggcgtagctgatcagcattttcagggtcagcttcgatttgttgtttcatgaactcgattttagctacgttatctttacgcagtgggtaattttcatcagcgtattgacgagcgattgcagacttaccgatacctgggctaccccaaatcatcaggctatcttgaatcatgtcagctagtgccattgcttctttagctttctttggagtcagtttaacgttcaggatatcgttttgagtagtcatgtatatatttccttttgttggataaaatcgtttaagtttctattatagccaatccgtgggcaaaagtaaaggaactgtgttaaaataatttaacttatcagttcctttgttacttcatgaatcatccgtgtgtttaaaaggtaaatctctttgctgtcttgatgtgaacattatatcacatcgtttcaacttgtcaatcacttttttctttttttcaaactcacatcttgtgacgcttgaaaactttatgtctgatgcttattatatcacatcattctatcttgtcaacatttatttttaattcatttttcttacatatgaatagaaaataactgtttaaaatcatcacaacacaatgttaattcagtgattattattgcgtctgacaggtatatgtactgaccttcaacatagtaaggtgaagtacatattctgtcaagtgatgtgaacattatagaacttttgaattctctttgcaaggggatttttgtaaattcataaagattattttctttacaaattccatacccaaacttactaagacgtaaaccaccgccagttctgaaattttcaaaaattgacatcagaagcatacggtctgttatttctgaatctgattcatgtacttccctaactttggaaagtacattattttgatattcagtactgttatgtgatggttctggaaacatatattagtctccaacaaaaccttgacgtgcagcataagatggtgcaccaggttcattatagtgttgtacaccttctttgtcaattgttggtcccataccttcagtaccaaaacaacctgcaatggcttccaacacttcgtcatcagcaacttcagtactttcatcattatatcgaatatcagacaaaatgtcacaggctttttgtagtttatctacaatttctttttggtcttcaccagatttaatcttatcaacaatgttaataagacatttggtaatatccttaagaacatcaactgctacaacatcggattcaacttcaactgaaaaactttcgtcttcatctcttccggtaatttcgtctaacgcttcaactagttcacgataattatattgcatattatttgtctcctaaaaatttcttgtatttttcttggagactttcaaaaatatcttctacttcttcatcagaatcatcttccaagtcaatgttaccttcaggtgaatcatcttcttcactttcattaacatttagtgggttatctcctaatgcagtgcctgggaattttggttcaaatttatgaacacgattttcgttcccttcattatcataatactcaggttctggacgattgtcaagatcttcatctacaacacgtctccaataaaactgattgccttttgcaattacaacaaaatggtcaccttcaacaccattagtctttagttgaccatcacgaactgcatcagcttctgttccatatggaccgtaatcagtactgttagatggttcttcatcttcagagatacttagatctggtagaaattgggtatctttcatttctttatcggtggcaggattaccctctacggaaaaatcttcgtcttcttcttcgttaataccagcaagggatagcatacgactaaaatcgaattcttcttcaataatttcttcttcttcctcatcgtcttcttcaactgattctagttgaggttgaccactaaggtcaagagaaaaatcttcttcaccttctacacctggttctgaaaattcagcatccatactaacttcatctgagtcagcaccaaaatcaccaacatcagcggaaagatcatcaactgccgctgctagtgggtcttcaactgaagtttcaattccaccaatttcttcttcagcaccaatagaatctagatctagtggagcaataggtggaagagatggagtcatagaccccattgatggtactggagcagcaacaactgggtcttgacgttcagcttgacccgcaagtgctaacatacgtgatagtgtttccaaatcatcagattctaaacctgcgatatcgattttaacttgtgcttcattaatttttttagccattttaaataaatccttttagttatcaatcattattatttaatgattttaaaatttgcactgtttcatcctttttacctgaaagtaaaatgtcagcagcaagtagagaaacctcatcaccacgagttagtagtactgtgatttttttagcataaggtgactctttaattttagaagctaatgattgtacgtcatcaccagcaattgtttcagatttagtttctggttcagaaacttcgtctggtttttgttcagattctggttctttcttaggttcttcttttgattgaatttgctcagtaccagagtctacttcaggtgtttcatcacttttaacttctttatcttgttcatatttggcaagtaatttagcagcagttgcttttggtataaacttaccatcagcactaatgaatctgtcaccaccaacatacgaatattctttgccttgtttggatttaacttttgtaccgattttcatagcaccggaattgttatgacggaaaatatcacgctgtgctgctcgttcaacacttttagaagcacttgtgttaagttgctttttactttcgatatcataccacaagttatttttcttagcgtatgtttttcctttagaagaagtcattctataaccgtcaggaacagtaatactttcaaattcttcaatttcttcatctgcttcattaattgattctttagttgcaaatactggctgtttagcaggttgtgaagcttgttgtggcttttcacctgaaccaaaacgttgctcactatgttcttgttcacccgttaatgttggaaaatcacttgggttattcttaacaaattgctgatatgcattaataattgcatgtgcattttgttctggaattactacattaccatcattatcacaaaattctttaccattccactcacaacgtgtattgccttgaactaaggttgatttgattggaattagtttatttttagaagctaactgacgagcaatacgcataccttcatctgatagtttacgggtcattgctggatcaactgctcgtcctgatttcatatcaacaaaacggtgattctttggcacaaatttaaaaccacttacttccatacctgctggaattgatatatcatcagcatatggtggaagaatgtaaaattttaatgcattccattctttttgtagtgtttctttagaaacattatatactcgatgatcatctgccattaattcagtgatgaattcactttcagttaatagaattccatcttttgaattgaaacggttttcaccaataaatgtacactctttaccttcaacaatatatttgttaccaatcttatattcatttgaagctagattgtgctcgacaatctgttgtcgagcacttgcgtacatggatgggtattttctagggtctaccattaacatattattgtcattgaaccagaatccttcaagaaatacatattttgcaccagtatgtgacgtatatacatatccattaggaactgtggtagtttcagtactgaaaaaattatccatgtgttgattctccttaagaaagcatacgtaacagttggtcgcgttgctctggacttaatttttgtagagcatcagggatactggaaccttgtgcttttggttgttcttgttgtgctggttgctcagttgaggtcgattgtgatggttgtgattctgaactttcttcgccgccttgttggtcacggtagtcattcattatatcacgagcagcatttaatagagcagtacctacatcttttggtgtaaaagaacgacgaggattgttccctaaatgtttaatatccagattgttacctttaaaaaactgtgccacatcagcgtaaggtactgatggttgagctttaccatatttacgtccaacatatcgtttaaactcagcccacaatcggttagcttcagcaccaacctcttgtgcaccttgttctatctgtccactaccaaaaaagccttttacttttccttttgcactatcaactgcactttgtgaacgactataaggacgagcttcatttaactcattgtcttcataatctaacatttcattaagtatactcatgtgttaatcctttttaccaaaaccagcactcatatattgagagtatttattgtcttttttagatgcttcaattgcatcatcaactgctgtttcagcacgttgttgaccagctaaatcataactgtcttctggtttaccaaaatctacaccaataattggctcatcaacatcatcaaaatcgatatcatcttctaggtcagtcatttcaatttgacgaggttcatctttactgcgtacacgaatcagtgcttcggtcatacttagtaaattaccgatttcatacattagtacgtttgattgaacaccacgatgacatttaaaatcaaacatccaaatttcaccacaatctaattcatagaaatctaatggtttttccataaaaattgttttcttaagtgcaccaatttcaaatgcatcatagcggtccattagtcgctgtgttactttactaagttgttccggtgatggttcaactgcaaacttaactcggtattcataaactggtttcttttcagttaggatttgttgtaatctattcattttaataactccataaggtcgtttaagttatttatttctgttcattgatgcaagcatttcattgcgggttttgtgaactacagtttgcccttcaattgcatctgggtcaccaacagactcaagttctttttttggtttcaaatttagttcaatttccattttgtcttttttaagttggagatcaactaatttaacatctgaatcaattatttttgcatgagcatcaagagctatttttagcatagagtttgcagcattaatcatctctgctgcaaaacgatcttcacaattaaatgctctatcaaaaatatcctcaaactttcgttctgccatttgtgctaaacgatccaattgggtttttcttgcggtaatatcaggtaattccctcaactgtacacgcattgctttgagcttttccattgcaatctttgcatcttccaatgatatttcagtttcagttttgtcttcatcctgatacaaatccatttctgtatcttcttctggttcttgaccagtcatttcaatccattgttgagcactaggtaaccccagtgcttcgtctatttgtggtttagatttcattttttgtatagattcctttctgttataattttaaactccaatccggttatttttacaaaattccattgcataagcccatttggattgatttatagcaactgcaattttttcttttttggatttagccaactccatgtggcattgtttgtatggcttgacttctagtacttgagcatgttgcttaccatcagcaccaatatatagtacataaaaatcaggccagtactggtggacttgtccatctattggactaacataaggaataccaaacggctcaatactccattctatgactgctggattattatccaatgaaatcattatgtccttttcccacgaactacggtatattggttgattattacttttatactttttaatgttttttataggaaagataccttgagcttgcttagtatttgttatctttgctgggttaaattgttgattgaaagccattaaaaatctcctaaaatgttacctaatccgaattttgaacttgcttcagaaaccaaactaccaaaccctatggcgttagcacctctggttacagcagaacctatgtttcgaattgtgtcaggagtaatgtcaccacgcaatatatcaccagcactacttattatatcactaactgacgtacctgctcggataattttaccaattgttaaaattcctttggttttgtcgtctaattcaccaaaatacttaaaaaacccactaacgccaagaccttctgtgtctgttattagttgtgctatttccatagttggtacaccaatgctcaaatatccttctggaccaaagttgttacatgcttcatatcgcatagttaacgatatcaacgaagggtctgcttcactttccatagatttggtttctaattgtacgtcttctatgaatacatttatcatgttatgtacagtataagtttcattatcaatctcatatatgttaattgatttgaaaaagtactgattatcgtagtttccattgttcattactgaacgtccccagttaccacctaaaccattaaagttttcaggtgtacttagaacatcatttctatatgactgtggatttttatcaaagaaatcaccataataaaactttctatatgcatccattagtaagtaaccagcaccatcaacggtatcataaaaaacgacattacttggtttgtaaacaatgtcaccagtaactagtcgttttttgttatattggtttactgtttcaatattaaatgaaaaacttggtaaagttacatctttaacaaaacatgatacattattaacatcaaaatcagtatgtgtatctggtaattgagttttaataaagtttttcgcaaaaggtgttaacacaaattctataataaaactatttttgaatttaggtaaattgtaaaatgaaaaccccatttcacctgctgtaccaaacacacgttgtgcagcattatagttctgaaaagcaggttcacgaacaatgtttatattatcaataacgccatttacaatacttgtaccagtactgacaaatgaatcaaaaaaatcactcattcattatctccttaaaatcctacactaccaaaaacacgatcaatgatatctaaaccttgattgacattttcaggtaaaagtgaattaattctggtactatacatttcttcaatgttatcaaattgtatacaattatctggtttgatagtcactaccatttcaactggagaacttgaactatagtctaatgaatcgtatgatatgttttgaataacacatccggttaaaacaaagtattccataacaccagcactgttataagaagaaccaccaataaattgatctactgcatttactaagccagcattatttgttgcagcagttgcagcatctactagtgtatctcttcctagattttctagtgtatcatctgagttacgaccactcaacatctgtataactaaaccaaatttataagaaccataatcttggtcatttcttgaagttattctgcgttgaaagtcaagttgtttttgtagttggcgtgataatgcttttgctgatgcattaccaactgaatcacgtatagatatagtaattggttcccaatcatgactacctatataggaagtattagtagtaaattgatatagtttatgagtactaaatgttacagtaggtctatcaattttatcaacatctaatgcgatgtgatcacgttcatctatatcagtaccgaaattatacacaataacacgaaacttgtattttgctttcggttgtagcattgaacgattacgccccgatggtaaaggaacgccatatttattaatcatgttatttgccatagcaacctcttttttattttataaggcattatactttatttagcataaaaaaagccccgaatagattcgaggctatatattaagtttaaataaaattaattttcgtagaagttactatctggtagagtagtactactaatattagtttgtgcaccagaaatagaggtagcagttgatggattaccgaaaccactaacttcatcaccgaacgcttcgccatttggacccaatttagcacaaccatctggttgaacagtcattgaaataacttgtgcttcacttgaggaataatcccaatcaccaaagttgctggattcaataaagcaaccttgacatacccaagtactcaatgttccttcaaacaagtttgttgtattttcactattagaaccatcaagctcttgaatccacatttcaaatttaaattgtgaatctgtcatgcgagattcttgactgtagtagttaaattctttacgcatttggttgtatagtgctttagcggaagcattacctactgagtcacggaaagcaacatcaattgtatcccaagtgtatttccctttgtagtgtgcagaactgttgtaactatgaacagtgacgttttcatgtgatacagatactgccccaactgtattggtgtctagtgtaatcatattaccatcatcattagtaccaaaaccaaagaaaataacacgaaatttgtattttgcttttggttgtttcatagagatacgaccaccgccagcgagcggtacgccatatcgatcaagcattgtagccatttatattctcctattatggaatgacatctttatattatttatctatctggaagtatatttttaattaactaaagtgtcatcaacagggaaccaattaatattaacacaatataagtatctttttcgtttagtgtggtcaatatagtttactgatatagaccattttccatttgtgtatacttcgtatttttcaattataccgacaatcttctaaattttttaaaaatatatttagtatgtgtattgattctaactgagttaaaactattttactgacatcttgtattgttctttttagtatttcttccatatccataatgtccctttataacatcaatataaaggtatttaattttaaacaataaaaaagggaaccaaaaggttcccttagtgttttattgagttttttcgatacggattggtacgtaaatgaagttaatactcttagttggttggattgcaatatccatccaaagttcattacggtcaatacgctctgcggtattgttactttcatcacaaactactgcaaagttataaagaccctgttgttgaacaatttcagccaagaaactattaactacaccactaaattcctgacgagtacttggagtattcaaacggaataggaatggttcggaaataatttctagttgacgacgaatataaacaactaaacgagcaacgttaacacgacttagtgcagaagtttgattagcagatagagttttatctccataaacaagcaaaccacggttaggacgcattgcaattgggttaatgttgttagtatacataacgtcacgttgaccttggttatatactactggttgatattcaccttcgctgttgataaaaccagtacttgcagcgtttgttacaacaccacgagttgtaccagcaggtggataccatacataactaacactatcgctatatgcatatgtacgcattgcaatagtactaccaggaactgcaacctcttcaccatcaacgttagtacttagacaccaacccatatactgagcagcataatcataagcagttgtacgaccaactgaaccgttacttggtgcattgttagcattagtagcccattgttgtacagcactaccgtttccggttggattcaaacgtgctggaacgtcagtaacaataaatgcagtttctttacgatcagtgtttaaagttacacattcatcaagtgtttcaacgtaaccaggtacacaaattaggttaaaatcaataaattcagaacgaatgtcatcattaccaataataacagcagctagtgcttcaactactagttgacgttgtgcagcacgaccaaatagaccagcaccatcaagacttacaccactaacaacttcccattgaccattaaccattttcttaacaacaccttcagtgttacctaggtcaacagcaagcataccattttgatacaatgccgcagcaggaacttggcttgggaaattaaagtcttggaaaatcataccatttagtgtactttggtcagtactgtcaagtttaacccattcaccatcaacgttacgatagaaatcataaccatcaatgccttgagacaaaggacaaacccaaattaaacggtcagccgctggttcatcaacttgtacatatttgttttcttcttgtactagatcccattcatcattagcaacatcagcaacatacatagttacagttagattatcggagtttccgaaatcataccagagagttccttcttttgctacactacgtggtactgaataactaacacggaagttattaacgttaattagagagtagttgttactatctacagttagtttttgtagttcagattcagcaaaaatatcatcaccactttgtgtgattttgaaactgtaaccttttgtattggaaacaactaaaccaccattagtttcacgtttaaatttaaaaccatcgttaataatttcagcatttgcatttagattattgatgatagtttgggtattaataacaccgccttgtggaactgctagtactttaactgatttattcaaataaacaaaagtcatataactatcagcacctgcttgttcaataatagtttcaccaagtggcaaagcaggagcactaattgttgttagttttgcactttgaatatagaaagagaaactcttactatcttcatcaaaacgagatgcgatataactattgtttagtacaccacttttcgcttcaatttcttggaatgaattaccagtatatgctggtacaatattccaaacttgagttagggatgcataacgtttaataacaaaacgagtaccaaaatagtttgaaccattttgggtgtaaccatcacgaatccaaatgttacctttttctacagttgagccaactggaactttgttaattggtgataggtaagtttccatttgcactagcccagaagcagaacgtttatacattagcatctgaccattgcttggtttgtaacgtagaactaaatcatcaacatttaaacctactagacttacatcttcaacttcttcagcacttacaatagttactggcttaagttgccaatcataaaaactgcttggactatctttcttcgctacatacgcttctacttgtgattgtgcggtatcaaaccacaaagtaccattggatactgggccagtgggtgcttctgcacttggtgctagttgtgctagatcgatatcagcacgaattacatatgcacggttagtaatgcctagataagaatatactgcatgtaggccatattcgtttagttcatcaccttgaacaacagaaccgttattcatttgaaaaattggtgtaccataggtatcaagtgaacttttttgtgatgttagaagctgtagttttccagcgtttgctttagtagttcccgcagctattgcactgcttcctgggacaagtttgtcttcagcagtagcgattacaaatagtggtacagtgccaggagcagcagcggtactcatactttcatcagttactgaaatggaaacgccaggtgagagtagatctcctgccatattaaatcctccaaaaataattggttattcgaaatatattcgtatagtcttatttattgaaggatttaattgtccagtccttattgtttataatttatgtattagaataaataatgtccattgcttttttatgtaaatcatcaatagtactgttattctgtacaattatatcaggattgtttattccaatccaagcccactcagattcgtgtactgattcaagttcaactggtttaatattaatatcccctttattataagaggcagccaaaccataccaatgtggtagaacacgttgaacttcaataatagtcccattattcgatctaatcatttttaattcatttggaaaacggcaatcagtgatgatgatatttccatctatgtcttgcattgatttttctaaactgaatacccaaatatcattatgaaaatacttacgcaaaatattagtaccataattctgcaatacccatcgaggggatacatcattacgacctaacttatcacaccagtactgatccggttcttcacgaatcttacgactttccttagttgacccctcaagcatttcacggtcccatccaaagatagcagcaactgaatcttttagattggttgcgaatgacattcgtgtgtaaccattattaataaaagattcaccaaatgtatctttaccacttccaatagttccgttaattgcaattatttgtcttcccattatactactccatgtattttatataatttctattaaatcctttcctactaaactttcaagtaatccaagaattgactcattaccataatatatagaaacataagtaataaaaaatgtttccccatcatcatcacgatatatactcgcccatgcatttattcgatctctaccgataacatcaatgattgaatctttgataaatttccagtacttttcagttgattcataatcaagcgttggtctaccacaacgatatctgttatacgttacatttatgttattattcatgacaagttcctttagattaatattatcattatatcacataatatgaaaaaagactccatataggagtccttttaatttaaccaataatcataccgagtggttcagcaccatcttgataacgtttcaaacgctctttaagctgttcttgaagctgtaaaccttcattgcgtaaggtatcaccatccatagaaaacgttccctgtggtccaggaagcgatgcaaatttagcacggttacgacccaacataatcattgcttcggataaagcccaatcacgcaaccaaggataactttgctgcctttggaacaacaatggttcaggaatattatgatagacgtgtaatagtacttcttcagtaccacgaatatcacgatctataattaattttttggtcattgggttaaattgaaatataatatcacgaccaaacatacgacctaccagttcttggaactgaaaactaaaatcatatgtagttagatcatatccaccagcatttcgtgctgaagtcaataagtaagtgttggtgaatgctagagagaacgggtctactgagttcccactaccagaacttaagtaaccattaccataacgataaatctttttaacaatttcaacttcagttggtagcatatatacagattgtgaatcataaaatttcatatttaaaaatgcttcttctttagaagcagaactccacgctctgtaattcgataccgcattatcaattgcaatttctaattgaccatcagtaatttctacctcaacggccccagcacccaacatttgagtgataacatctttcagtttttcacgatggtcaaagttaggagcatcagggtttccacccatataatcgtaagacataaaaaagcacctcattaatgtttatatacattatttagaggtgctaatagttattttgaattatacaagcagtacaggtataccaatggagtaaaatgttcggaatctattatatatattaactgagtaacatatattccatatagatctcgtgatttatctctgtacattaacaatgatttatttaagtaaggatcaacccagtacttaatatcattgtacttcaacgtgttgttacggtaacctgatagttttgaatttttattcaattttcttacaattactcagtaagtgaatgatatcatcagcagtgaatggccccaataccagaacttcttcaccattaccgaaaatgctcaatggtactgattgttgaccagctagatattcaatttgttccagttcgaaaatgtcatcagcagcatatactacctgctccatttcattatctttaatccatgactgccaatgttctttaaacttcttagcttcgtattcttgaacatagttaggtgattcagggttgtattgatgtaacatagtcatcccagccattactaattctttaggggatggtgtagaatctttcagtactacgatagcttggatagtttttactttaacgtcattagcagccattatatacctctattatagaatgattttattctcaggaacgaaaacttttggagtgttttcgattgctttaatagcatcaacataagcatcaactaatgcagggtttgcatcactaacactaataatgttggatttataaaaaataacatttttctccatactaacaaactctagataatcacgaagaatgatttcaccattttcgtcagtccctagttgtgctgggtagttaactacaacagcttcagcagaatcggtttgaagaactgctagtactgggccaatgttattgatgtttagtagtttaacggtcatagtcatttttgtcaagtccttttgtttattttagaatgtataagtgtttttctgcattgaccagacggtgatcaatgatttctttgataacgttccagttaccgccgcccaaatcggctccaattttcgggaaatgtacatgaacatctcgatcaactttacaaaaataatttagatgtttgaacacatcgtcaattgcatcataactgacatatttagcaccgtcattaccgtacattttttgggtaatacagtttgcaataatcaaattatcgttaattgctgaatatgcaatttgtccaattctaagaaatcccatttccttttcatatgctttataatcatcatatgccattgggtagcgattccttagttcctttgcgaaaccagaacccatcttaccttgagcattacatccgtgagcaataatatgtaatgcattttgatcatcggtaacagtactgaataattcaaacagattacctcggtgttcatgaatcattatattctccgaaaagaaaggactctgtggtcagagtccttattttaaattattcttcttcaccgaaacggattttctttaattcttttcgatgctttctagctattgtacttttgtgaagtctattactgcgttttgtgtcttttgtaatgtaccatgaatcttctggtgcatcataatcacaaaatccatcttccgtaattgttcctaaaaatgcagattttttaggaatattagtttgagctttagcctgaaattgaccttttgctaattgttcacgaaaactgagcataatagtatctcccaaattgttaagaagaactttttgttcttcacatttatttagggttgccagaaaccttcacatatttgataaatgccaaaatatcatctttactaaaagattttacaataaattcgacagccgaatcatactgttcttgtttagatagatattctttcattttgttaattttaatctgggctttttctttagctattgaaatatcaggaattttgaactctactcccaacgtatcagctagttgttttgcacgagatgatactttttcaatatccattagttccaacgaccttctttaagaccttcaataaatccagtacaaccacctggtacataaatgtcatttacgaaaatttgaggaacttgacgaactggttcaccacaaatttcagacagttttgaaccatcgataccttcagcaacaatatctacaaactccatttcaaatttattttgttcacatacagcttttgcagtgtcgcaaaatttacaaccagtcttgcgaccataaattttaactttcatgttatttccttctatttctttgaaaagctttaacagctttaataatactgttacacattcgttcagtcaaatacttttgacattctcgtacatcaatgtacatgaacttatccaattctggatgactcttaccatatctattagtgtaagtacttttacaaactaattcatctggtattggtttgtctttggcagtataaaagaaaagtactaacctttttccctttctataggatacatcaccaagaaacagaagatcatcttcatcgatttcgtatcctgtctcttcgaaacattcacgtacagcagcttctttgaaagtttcattaccctcagctttccctttaggtaaatcccaatgattctgtccgtgttgtatgtccgataagtatctgaccatcacgataaaatattataccacaactataacgcatatcttatctctttgtcatcaatcgatgttcagatactaataattatatcagttattggttttttgtcccactatttttagaacatttgtttgattgcttcgtaacgaagttcacaaacaaaatcacgaatttctgacgtttcaagttcaccatctttaaccatttgctgaatatctggcaattcaacatcagtataacgatcataaactttaataattagatcttcaagttctaaatcaatttcttttcgcaaaatgaagtattccaaaactttataaaggaattcttcacctccgttatttttaatattcatatccaataaaatattacccatttcaattggggtctttttacggaatgttttgatatcatcacggaaacgtttgatataattactaaatttaacatacttaactggaactttaatagcaccgttaagtactgaatcattatttacttcttcattttcaagaagaatagaccacagaaaatatggtttatatacatcagtacagttatctgaaatataatcaataaggtctaaattctttttggtcaaagatgtattaaacaccttttcgtaataaccaaatttacttagcgtcttaaggaactttgcaggcttttcttcggaaaatgctttttcgaattccacaaaaacacggtcaggaacaagatgatttagttcaccactattgaccattccaatagcgagttcctcagtgctttcatggatagtaaagtctgaataacgagtagcaaatcgagcaagacgtaacacgcgtaatggatcttctttaaaatggtcagaaacatgacgtagtatcttgttcttgatatcagctttaccaccgtatggatcgatgtgaatttgtagtactggatcatacgcaattgcattaattgtaaggtcacggcgatacaaatcttgttctagtgttacgccttttgtatccacttcaaagccaccatatccagtaccagttttacgctcagtacgggctaatgcgtgttcattaccttctggacttagatatactgggaaatccttacctacttgcttatagccaatactttgcaagtacttaagatcagattcggatgcaccaacaatgacataatctttgtcttttgcacggatgcccattaaacggtcacggacgtaaccgccaaccaaatactttttcatgttattcccccatcaaccaatcacgtagacgttcccagaagccttttggttggtattctgggtattcatattcatctgtgccttgctcggaaacaccccaatcttcttctaacatagcaatcataatgcctccaattaaattaatctatcacgtagacggtcgtaatattttttgtgtatagctagtatacactgatatgcagaatagtcaataccaaatgtatcatcaatgaacatgtactgatcaagtgtttctggtccattatcatcaactggtaatgtcccttcttttttgatagtgtgtgccacatcaactcactttcaatatggtgagttgcgtatgtcaattctatcttactttttcgtagtaaaattaacaattcatcattgtcgtcgagtgcattacgaaatttaatacgaactgtaccctggaaattattagtgtacataacacgatgatgattgtatgaaatcaaaccacgtctttcagtactgatttcgtgttcagcaaagtactttaacgtttcattaaattttggaattttagtaacgtccaatcacataatcctcataaagttcgtataccctcattatactctgatatgtatcaaagtcaataccaaaggtatcctcaatgaactgatattgcaaaaactcttcctctgtagcagcaataggaagagtcccgtttcgttgttctgtggattgaacatcctcaatatacatcaacactataccttcatccagatttatatctatcataaaaacatcttcactataaaatatgttatatgtacggatgaagagatttcctgttctatcataacttgacacgtgtgtttcataatacattttatctaaactaaagaacaaacctgtactatctggctttttagtattttttaatttaatttcgatagcatcaataataggtttaatatcaaactttttcatagacaaatctcatatcgattagtgtttggatcatagcaataattatcattaactttaacaccaggtttaagtgttattgttgttcctacttcagtactgggttctgcatcacaataaatcatcacaccaaccccgactagtaaggatatgatacatataactatacatattgtatattccatacatttatctccattataaaaagtaattatacagtttattgtacaatataaaaaggtctttcacattatcataagtaatatcagatacatcatgaattaatgataactgaaaaaatgaagcttcgtctatttctgctggaattataacatcaccatcatcttcgtccattttattagtgtagtattttatgtgatctacattcaactcaatagagaacgcaatgttggtttttgtataatcttcaattaatccaatatattgagatttttcattaataaaaaatccaatcccaacacaacggttatctggatatggatagtaccatctattaataactaggtgttcaggtaagtccatatcatgtgttgatattatagattttacaatttccatccaggaataattcataattaaaactccataagaaaagggacagaattaatctgtccctttagtatatattactcttcgttttctgtcaaatcatcaagaactgggtgttctggatggtttcggcggtgtaatttaatgcttttgtctttactgaatacagtttccattttttcaaatgaatcaccaattgctttgtataaatctgctgcatcggcagtaactgatttactacctgatgttagagtcacagagtattgagacttatgctctttcttcacatgaacttcaatatccattacagttgaagtacggaacttttcaagacatttagcaccatcgtaaattgcatcttgaattgctgtagtaaaatcaacattaccttgaatatttaattttagcataatttacctaccttttttagagtgaacttaacaacaaatctgctcggtttgtaacttgacgataccataaggaattcattatttcttttttaaatttcttagggttatcattttttacactgttccaaagtttattaaacgaagctaacttatctactcccattgtatagcacatttcaaaaagaatacgttgttgttctttggtcagatttactgcttgttttttctgcatcaataataaaaagtcatcatatgttcttttcatatcttgcattaaaagtttgttggcttgagctttggtaataccgtttctgtacttgatagcatcagattcttttcttcccaaataatgcccataaccgattgtataattacctttcatatccttgtaaggatgaaatttagaattgtggaaaggaactccgactttcccaccaagtaaacggcgtttgttcttggactgaaattcaattgaaccttcagcttctttgatgtgattgacaatttctggatcattataatcaaactgtacagtcacatctggtaacaatacgttcttcaaatcctcttttgttgggataaagataccctgagaagtatgaagagtagcatttaaattgatatttttcaacaaaataacatactcttcaagttgtacatttttaggtttaaactttttagcaatagaataataactatcaccaggttgaaccgtataatgcttctcgccgcgtggaacatcctttgatatttctacctttggtaattcctgcttttgaatttgcgtaacttgtggttttaaattgtgtacctgactttcgtccgatgatgatacacgatcattttgagaaaaaccataaaatccaatcgcagcgacaagtactgtgcaaactagaacaccataagtagtcttagttttcagtgcttttttcgcttgtttcaaaacgcctcctttgttgattgttaagatgggcaatcacaaagatggcaaagaggccatttgcaaaagcctcatcggactttctacagtacaaaaacgttcttttcaaatgtttaagtagtatagcatatttttattttattacaagacatatttactgtaaaaaccacattaatcgtagtaggttctacctacagttatgtgatatttaaagtacttggttggtagtcctagttcgtttctaatgtgtgtgatgaaatcatcttcaaattcaatgataaagaatgaacctggattctttttatcttttactatctcaatacaaggattgaactttatctttactttcattccatcgtattttttccagaactcttcatgtggtggtacttcaccacgcactatactaacatgtgctccccattgaggatctttaacgtcaatatgtaaatcagttctgatgaagtactggtagtatctaaccaactgtaatggaagttgcagtactaaccagaagtccttcttctttttcatagtgccacggtctggatcatacaccagagttccttccatttcaatcatattttacctataaaattacatatatgtttttattttcaatacgaacatatgtttccaaaacatctttcggaattttattacttgttttgaaccatgtagtattctctactaaaacaaaagtttcaccttcagtttcaccaaatgtacttagtgcataaatgaagtaatttggtgctgcactacaatagatatcagcattaatttcaatcatatgttacaccacaataaagcttaatacaacgagtgtaataaacacacccacaatagcagtcatttctgggtttgcatcatatgtatagcgtatacattttagaaaatctttaccaaatttctttagtccattcatatattttccttttatttcttgtgtaaaggttcatcactttcataataaattgtatcattatttcgctctatagtaaagctcttttgacacaactcttcagctaaaccctttgcatagtttaatacatctcggttgagatatacttcttcttttggaaagcgtgggtactgaataatacgagcacacatcccactttcaagaccgccagtgtagatatattcacagggaattaattgtacacaaaagccatgcttaaacgcaaactttcttgtgtactctcttgctgtttgaatatcaccagcaatatggatattccagtactgtgtctccactgtacctttatcgatgtatttcatactcatctccaattatagcactaaaaatcttactttcccaactcttctatgattctttttattgaatcatgattttccagacataaagtactgtaatttctgccagttttttcattgaggtcgtcgatttcaatcataagatatccatatgtaatatcttgaaccctacttcgttttacccttgagtacagcttgattggtactgatacacgagtattcaaaaacaattcagataaatcataacgatacacctggtattcattcttggaacgcttacgactgtacgattctaaacactgcggataacgtctatcaaaaatactggtccttagctgaagaatcatcggatctaacttatgtgagtaatattttttaattattttctcaaaacgcttaatgtgacgtttcttccatctcatgttctaactcctttcaataatacaataggaaaatactgtgtatctatatcagaaatactattacagtactcaataatttcttgatggagtgtgtttatataaatgctaggatatggaattggtgtttgtattagtccagaactataaacacaatcagttctttgacaatcaatatagtgtgttgttggtatacctttaccacgttcctcaactacaattgagtacgagtcagcaataaaaatgaacgcattgttaattgatacatattgtagggaatacacatcatcatgaacttcaatcaaaggaccatcaaaattcatcaataccgaacggcgatatcctaacacatcactcattgcatcgaactgttcttgtgatgaaagataacaaaaacacgtatcacgacatacgtcaataaaacgcttaaatgtttctgtttctataagcatataattttccttaaaaaagaccccacatagtgaggtcaaatacatttaatcgttatcatcatccaatgcgtcacggtaaacataataaacatgtgcacctagcagagcaataagtacaataaagattagccagaatggtacaaaatgcagtactagagaaaatgccagtactgtaataaccattacaactgaactgaaaataagacggactgctttttcaaatccagatagtaaatttttaaagatttttttcataaatgaatcaaccatttttaatcctcaagaaagtatgcttacattttagtttattaccatagaatgaaataggaacattaaacatttcaatcttatcttctttcaacaaacgtagaatatcaggatcattttttgtttgaatacaatgaagaccattaacctgaatttctaaacctttctttagatattcataaattttttgacgacgcatcccgccataactatcattatgcaccacatcacgtagttctttatattcttcctttaatgttcggtctacaagtgttccatctttcttcctgatctctgcaatacatttatattgatttgaacctctaagagccatgttgtacctcattagggtattttttcatcaattcgtgtaaacgctgaatctcttgttctttttttctatcactctcgtattttcgagaaagtttcttttttgtatttgcttcttctaatctaatatcagtacagaatttgtcattttttaaaaaattgatacgcaatgcattgtaaacagcattgaaatcgtttcctaattctttagacgtgtcagtgtaattatgaaaatacatgttatttgtcatatttacatgttcaattactgcaccattatgagttacgataaacattatatctccatactgttcacgtggttctgtacgatatagatatatatgttgacgtaaataatcttttaattcatgttcaataccactttgttcataactttgatatactaaaacctcaccatcagttgaactgttgtcagattcatatggttcgcggataattataagattatacatattactccttataccggagatacggtactcaacattagtaaagctgtattttcatcaatttcatgatagttgtcgcatacaagtgtttccaacaactcaggatgataataataatgttcataatcagtatcattaggaatatgatgatatacaaatacaatatcaaacacatcatcatcattttcacttttgaaacgctttaattcatcgacactttcaacaaagccatattcttcaaaagcagttgtaccatctggtagtttcatccatgcacttgcaacaattttcataaatttgtgaatccttattattttgtaatgtttagtttagaaacgaagtattctttggcttcttcatatgtcattgaagtatacataggattccatttatcgtcaatatccataagtactttaacttccattacatcttctggtgtatagaattgccatgtattgtgatctggctcatagttagggtctagtacaaaaaccgtaccatcctgaccataaacttccccatcctctaatagctcacggaagaaatcttctccagtagttgggtcttcgtatgcattataaaaacgaaaaacaacattctcaacatcagttcgggtagtaccatcgtcttcatcatattccaccaaacggtcctgatgaaatactaggtcaatagcaccaatgcgaggtttattatgtggagttttgatttcttgctgggaattgaaatcaatacgttcagtactgatgaatactccactaggggtgatttcaataccagacacattttctggtgaatagtaagcgtcacacatgtcatcaatgtgcatgtgctcatgatacacttccatttcaggattctgcatcaacagtgctgccaagtcttttgctttcaatcttcaatctccatagaattatcatcatcataatcatcactggtgtacttagtttttacctcaataccattctcatgtaggtatgtgataaaaccattaccataaacgaattgattataatatgtattttcttctacatgtgcatcataatcatcttcataatatgtgggtattgtaacatcatgaccgacactttgcaagtactggaacaattctttcagtactacttcgatatcaccttcttctgtaccataacaataagcagattcaccgtgagtgaatttgaaacctttacaggaaactgtataaatgtcactcatttgtataccacaatcatcacattcatgtatagaacaatgctggtggaatttaatctttttgatttgcatttagaaattcaccaattttggtagttgatgctttaacattgaattcagaatcaggaaaatctttagaaaatgattcattttgttcttgtgaaagttcttttttcggtggaaataacattttggctaaatttttaccacattcaattgcttcatcatatgacatattttcccatgtttcatgccaagtattaggatcatattctgtcagtactgaaatgaaatcaatatcatcagatgtataacaaacagcatgttgattagagaattgtgttgattgatttttacctaataaaacaattggcttttcataaggaatgttaaataccaacccatattctaagctaagaacagtttgaatatgtgaaccctccaattttggagtaatagtaccatccttaaagaaaatttgcacatgacccaagagggggtttcgtatggtgtaagtacattttcagaaactgatgtaggttttaccgttgtgaaaataccagatggtgtaaccattaatttattatcaaaattctgataatgaaagtcactctctgcatcataatgaaaaatgtctagattcggttgagacagtagtaattttgctaattcatgcgatttcatattatttctccaaaagaaaaggagagtcatagtgactctccatgtattttattgtaaaactttaagtttgtaaagtgttccttcaacaaaactcataatatcttctaatgtgtttacactgccgtaatcacccgattcttcaagcatatcatgaattgctctgcattgctcaacatattcttcaagaattggtacacaatcttcaattggtgtaaaacgataactattaccagtcccaacttgcaaagcaccacgattattcatgataccttcaacaaatgcgtctacatattctggtaattctttatatagttcatctaattgtaaatgctttgtataaaaatgacattgtaagtgccagttatgtgcagcagaacttaaaaacaaactattttcaataaaagttaatagtacttcatcatatgaattatcttcttcagtacttccgataaagtccattacgtgtcgtaaatcattaatatcttccataatatctctccttagagttattctcttattatttagttaataataaaggtaatttcaggattcatttccgaaactgcattgcgtttacttctatcccatagtattctattattatacaaagaagaatcacatactacaagtaagcaatttcttaatctacttacagtactttgattatttaaatcagtttctgagataaaaaatacattttcaggaactactaaaggaatagatttatcaaaaaacaaaactacaataggtcttgttgtataaactgatttaacgaaatctaaaatactattataaaaattagtttctttagtaattactgacggatctttaattcttttcaaatattgctgtggtaattgatgttcgtcttttatctggaactcaaaatattctttgaataacatttgtgttaattcagatttatcggatattttcgttgtgttactcattcacttcgttctctcgtaactcaagaagtcactgcgtttacttcgtaaactagttccttctgaaaatgataatgtactttaaaaacttgacgggatttgttgaggactattacatccccccgcaggggaatgaaggtaataaaaaagagacaattaagtctctcttgacgatgatggcatcggatattatcgaattgcgaatttctcaaattttggacggatctttcttgtaccaaaatttagagagcgaaagcgggttgctcggtttctctctatcgcagtcatatgcaacggtcgctggtcttttcatcaacagcactcagtactaactctattcgatcaaagtagtacctgttctcaaattttggacgcaactttcttgtaaaattgcgtccgctattcttaaactcccttagcaaatctggtaaggtgcgaaccttatacatctatctaggaactctctgtatgcttatcggagttctttatacagccgtgtcgccgtgattcgtggtcttaaatcgtgtttgtttgaatgccagtactctaacgggtttcttctgctgttcgctacaacggtaaagctcatctatcctttacattttcaagagaagtaggttctcaatatccatttttcaatgtccgttgtcattttacaatttacattatatcacgggaacatccaatgtcccattacatgtatacttttttcaaatccttagaacaacgatcaaaaactgtgtttataaactcaacatcttcaataatgtttgaatcttttgcaacattttcgtttcgtgtcgtattcctatatttgtggtcaggatgattgtacaccaccttgactacattatttaggtctataaaatttgacgttttttgcgtataggaagcctgaagcttgatgagtttaccatcattctcaagattggttttatgaattagttcttcaatgccagttaaatggctatagctatctttttcttttacaaaagtaatagtaacaagaactgctttctcatctcccatatcggaaatgttttttacagcactgataatttctaagtttgaaaaatctaattctttaagcattttacaaatatttccacaaagttcgataagtgataatttcttctctggtaacagaaacttcattgcacttaacaccatcagtttcagtactgaatggttgtactggtctatcttctgttaaacctcgttcataagtacaatgataaaacttatttgtgctcatgtcaagaaatacgagatcaaattcttcagtccaccttctgtgtcctttgctttcattgcagatgattttatattttacatctggtttaaaagtttcagtactgtcatcccatgcaccatagtcagtatattcatcattttcatctaactctgctagatgccacattaattgtggtaaaaagattttagatttcatttattttctccaaaaaaaggacttgaatactcaagtccctataatatcatatcaatcatgtttattcaatttcttctgttcttttttcaaagctttcatatgacgaccaaactctcgaacatgccatagatgatcagtttcccataattcttgacgtaacctacgttcttctagtagtttcgacttgtcaatgttatttttctttttttgtacattaaagaaattattcatattttcttggagaagattacgacctttaactttctcaagaaactcatcaactgtttcagttttattcgaacgtagttgattacatctggagcacatagtattaaagtttgactctaaatcaggtccacccttagatgccagatgattatggtcaactgtcattaaaacttcataaagaccacatacagcatatacatttaaatgtggtttaccatatactggatcagaacataatgaacgttcaatgcgtacttcagtagcttcaatcccacatgccacgcattttgtattcttaataaatgtaagaactttttgtgggaaatatcgaaaagtaataccatttaaagtgtagcgtttcatcttagtacttcgttgatttaattcttcaagaagtgataatttagtcgtatagtaaacatgatatttgttcattttattccttgatattgattttaatatctttaccttgtaaatcacgaatagttttaatcaatgcgtcatgttttaaagcacattcattgtatactgcatcccaacgagtaagtactttaagaatttctgcaccatcataacctttaaaaccatttttgtcaatcataattttttgtggtagaggtgtatcatcatcacatctttctaacagaatttcttgtttaattggtgcgggggattgtagttttacttgctcggcacacccacttataattaaaaaagaaatcattggaactaataattttttcatttgaatttattcctcgctgcttgagaattttgttttagttcattcagtacttttacaccatcttcatctaaacatacattcttataaacttcacgttctacaataaaaggaacctttgtttcaataactttagcattatcttccatgatttttttagtttcaaggtaattttttgcattttcttgttgcattttatccaaggcggtatcaacttttttagctatttgttgctctatgctttgttgatatccactgtaataagtattagcttcccaaccagcataagctgaaccgccaattaataatacaaaagaaattggtttccaaaatggaataagaatttttgaaacaattatttctaacatactcataataatatctcctatagttgatgatattatttagagtatacaattgtatagttttacaacattttttgaatatgttctactagttcatacagcttagtttcattattctcgaacttttcatcaacttcaacattgaatttttcttctagttccattaccatttcaatccaatcaagccaatcaaaatggaatttttcttcgacttccaatttagtaagattgaagttcgctgatacatcattctctgatgtatcacaataacgagtagtgatgaatttgacaatttctttttcaacatcgtttaattcacgagtttgatattcgggctgaagataccaccactctcccttattaatagattccaattcttgtttgatttcatgcattactttataacggtcagtacttttatgaatagaattgacttcttggttcaatacatgtagtgcatttttaatacgttcatttaacattttatcaccttataaaaaaagagaactccatatgaagttctctgattatacataattactttttctatgtcaagttataaatcacggaaacgatttggtgtgtttaagcggtacattgagtataatcccaatccacgcataatctcacctgcccagaaaccaaaaaacataccattatcagtaccttctctaactgctggactccatgaaccattcattggtgaacctggatttacaataacataattcttttgaagttcgagaactaagttatcagcgagtgttgttagaccttctattttacatccagccaatccagcagcacaagccccagctaaccacaacccacacatatgacctgtaaagtcccaatctggaccttcaactgtgccatctttattgaagattgttggtgaacgaccatcattatctttttgaaattgaattaaaaagtgaatccaattctcacaaaattcaacaagatctgctggtggttcaattcctctctctgcgagttcttgccatgctctggcagccccaaagaacgcacgtggttcatacccactccatgcttgatcaccccaatgtagcatagtaaatgtatctggttcaccatattttaagttatcccagcggttccaaacatatgcttgtgcacacggaccaacagtaccgaattgttgagtaaaccatgtttgggaatctttcataaagcttaacatgtttcctaagcgtgtgttatctactggctggtctttaaaacaatatatcactggatattgataacctggatacggtaaaccacgccaacctgagtactggttcgcatacgggtcagtgatgttagaaaatggtattgttcctggtgtgtaatgtaatgagtttaacaaataatctttgattacacaatcccctaactgtgcagtatatggtgattcacctgcaattgttattgaaaatgtcatagtatagtcatcaccgtcagcatccgtatataattctggaatgtcattaatacaataccaatcaattattgcagcaacaccatctactggggttgtatcaggtaaaatagtaatatcttctagctcactatatactggtgcatctggtcttgggtcagaacttggatgatttggctgatacccagataaacgtaatgtatcggaacttagtgtgattgtagtccattccccgtgtgttgcaggaatcatccaccaccatctccaaccattatcatctacaattcttatattgtaatcatcttcatatgaacgatatgtaaaagatttaacttcagacttatttgttgctaatagccaaaatccaataacagcaccatcatcttcaccacaaactaactgattaatggtatctcggcgtgtaactaatatatcagtactatatatcatttcggacgtagctgcaccataaggaacaactattctactatcagcaattatataaggggaaccatctgctttcttttctctaacaaatgcacttaaaggtgttaatgaatgtgtgatattttggtctttactttctggtaagccacaacgataacgaacaacatcatggtcattttttgtttttgacaattccagtactggtttaaatgataacggcttaccatcatcacatacaccaccataatctacaagtaatttagaatcagcattgaccctgaaccaaatagcttgttgttccattgtactttgtgcactttggtcttgcctgatagtaatatatcctagagaatttctaccaaacttagcgatagcatcacttggataaaaatattcataggaaataccatcagtgaatggtgtggttacaattgtactttgtctgaaaaatttatctctggagtcgatatcaccataagcatagcatgtgagtaatgaacatttccaacccaaataatgttttctttcttttgttattttatataacaaataagaagcatcactaaaccacaattctgcatctgatgcattatccgcaaattccaaatcaattggaacatgaagtggtcggttgtgttgcatttcatttcgttgaattatcacaccaccatattctactggttgacgattagcaaaatttaatttatatacaccattaattgttgtattttttaattgaaccgttcctttttcagattcgtcaaaaccttctgctaaaatattaccatcccagtcgatttttctacccatgaaatcaataatccagtcaacatcatattgatcaccaggggtatcccaatcaacactaccatctggtagtaatgcttttactgacgcatttatttggttccatgctaaagcacctttgaatgcgaatgttactttatccaagaactgaccataataaggtgcaccatgtggtattttacattgtccatttgtaaatgtaaattctacacccttgaaaccaccatgtgtaggccatccatcatcagctaaaggccagttagccaaaatcggttctttggcattaactatccagttacattgaagtggagttggtgggtctggtaattcacgtccagcataaaagtactgatgatatgcgtcccagtaccatttagctttctctaaaaacattggatcattagtagccatataagcataaatgtatcctaaaattaatagactttgcccttctgttgttccgtcaccatttggttgaccttccattgcagagtagtttataaaatgacggttgtttgctagtacaccttggttgttaacaacataatgttgtactgttggatctatggtgtctccagtatttctctcaataaatttatgatgaccataaagaagttgtataatattatcaatattattatttttcatattatactcctgctctaattaatgcaccataccatgtaacacctttatcataggtttctaacgaaataatatctttttcacccatttcatacgatagaaccacaggtctattatatgaccatttgatattagaaccccaattaactaaattcgaaccagtttgctgagtcaatagtactgtaatagaataaacttcacttggtgcagcaccaataccaatagtagtagttctatcagttaagttgatattaaaaactgaattaccagataaagggttaagtaaaatattgtttgaacttagtacattatatagtttagtactagcactatcatacaatgttacccattctgtttcatgattctcattagtagctttagcttttatttttacattattttcggaagaagtcattccagtccagccagaaataataaaagaactgtttttatttgttccaaatgatgcaattaccgaatcactaagagaactatcttcaccgtcaatagatccgagtactgacaatgttaaaaccatcatttttaatgtctacgccagttgcacctgaaaaattattttgaaatttaataactccggtagtgtggatatctgtgaaaatttgttgtgccatacttaatccttgcgttaatttatattgagtatttatcgagtataatggcatttttagtaccattatactcatgtatattacttataccattgcatttctctgatatcaatgataatttttgatgctaatttaatgtttggttttttgggaagtactgatttcttatatagaacatcacgaatgtattgtactttatcatcgaaatattctaatacttcttcatacttccacttaccattacgaatatccatcaacatttgtgcatcaggtcgtttaacttgaataattccactctgtaatgcttcttctgcactattcaaaagtctaattgtgtgcatagcatgtttacagtttccatgtaatgcagttttaccatttctacgagtaactagtgtaccgttcggaactgaaaaacaaacagttctgtagttagatactggaattttttcaagattttgtttcatgtttattttttctgatttaggtttcatattaatatgaacttgatacatttcaatataaccaaaattagtttcgtttgtgtatggtccccattttgatgtttcataaccgcacagtaaggctagtttttgaacatcatcagctaataatgaattagcagtataatatacatatgtgtcatcatgattaactaaattacgttttgtgccatcaccttgcaacaaaccttttagcagaaaatccatttttatttttgttaaatcaaatgcccaatttggaatccttttattatatgatccatgaccacaatcattatataatgcttcagcaacttcacgtggaaatacaaatcttgattcatcatttgattggtaatcttttctttcgttaatgtattcctgaaatatcatttgcccagattgtttgtattttgataaagcacaacgcatacccggacttgcttttgattgtgaaatgtataatgattttactttcccatctctaaaacttatactaccatctgaaagaaaccatcccattagttgaagataaactttgatatccatatagtcaattgggctttttttatctttatattcctttgttattggagataatgtattcaaaattttataagtttcttttaattgtgctgcttcaacaaattgccattctgacatatcttttttctgattacgtgcataattcttaacatacattcggtgatttgcagtcactaacgtatcttgatgatgaccagtgaaatggtatagatttccattgtataaattatcaaaacgttctgtgtatttttgatattctattttgtgatttttatcaaaagtcgctaatagatctttttcagtgatgtcgtcgaataatttccaaccatctttagttaagaattcagtatcgtaactataacagtcgtatccgtgttgtgattctaaaatagcacgtttggcattacgattttctttccatttatgataacttttcctattctcactattttcctgatattctttttcgttaaattttacaattagttctggtttggttttcaactcttcagtactacgctctttagaaaaataacgcaatgaaccatcaccattgatagtactttcattcggatttttaataatcgcaaaaatgttttctccgtaatgaattagttcatagccattattaaaattcaataaattgaaatcacgatctagaattttatcagtagtgtagttatgcactaatcttacaaaatgatattgctttaatggatttttcgaaactaactgcaatgatgtatcacgcatatatttttcaaaatcaatctttttagcattaaatggatgtaagttggatgtatctaaacgttcaacaagatactgtgggaatgaatcatacatccacacaagaacctcatcaacagggtgttcttctaaaatctcatttaatcgtttttcagcaatacgctctttatccatccaaccgtgatgatttgtcatacgcttaatctgattatatgcatatccagtgtatgaaaatgcaatcttggaactaagaagtttttggttaaatgaacgaagatagtcataaatttcagtactttcaacaatgtgttcaggttcaacccaaagtgattcaagaatattagggttagcttcagtgtataattttaaatactgattcaactcatagaatttagtatcttcttcgcttttatcagctacctctttgaccttatagaagggtgtaagaataaattctttattagcaagaaaaataccacgataatcagtatcactttcaggtgtactggttccgtaggcttgtgacccagccaagtgtttcactattgtttgttcaatatattggttattcatagataaattgttaactcctttaagaaaccattataataacgattaaagtcatgttctaatgttttataatcatcaaaactaaaacctaaattgataattgtatcttcttgaaagaaagtttcttcattcatacattcaataggttcgtaattaattccacctttgaaaacttttgtaaaaaacattccatcattattaatttcaacatacataaaattattttctggatcacgaggacagacgatattcagtgaactatttccacttgtattgtactcataagaaattatatcaaaagaatcaataccataacacttagatttttctttatcgccaaatacttttctatctgtactcatattgcgtatagtgctatagatatcatcaactgtagtcatagttaaccaccatactttgacttgtatgtttcaagtgataaagatatacgattttgctttttaattctttcatcaatatcctttgaattcttcacacttcggtatacgtcagctaataaattataatcttctttatttgagctatgctttgtccaacctatgtctgttttaatacgaacacttgctttatttgacgagtaaaagaaactgaaaccatttgacccatcaaaaatatcaaaagtatctacccaatcaccataaggaaaactcattgggactgactcgtggtagattgtgatatccgataaattttttgaacagtacttcgcaaagtgataaacaattggatcacatttagataattcatatttgtattcaatgatagtttttctattagcatcattgatagcatattcttttatcaatggacttttttgatgataagagtccatagaaacgattctaatccggtttcatcaactttttgtttctttttgaaaaatgaaatcatttatataaacccttaattttctgtctattatgtatatcattttgctggattttcaatttagtaaggttgtttcttacaccttcaacaccacgcattatttgtaacataattagtgattcgtcatatgttagtacattgctattattatcgatatatactttcactccactttcaagataatcattttctttggagttaaagtttctaataacaaacttaacgccatttgatgtatcactgaaaacatatcgttccgcaccgtagaatgtttttccacgaaataaaccgccgtcttcccacttccaacgactagattcataatcacaaacgtaatcaatgattaaagaaagtaaagggtgtttgctcaatttatattttgcatctaacaggatacgtctatcattatctgtggtaataatatcctttagtgagtagcttttagatataattttaaagataatttcatgccaaattaaagtactgttttgttttccaactgatccaaaaaacatatccattcctcattagtataaatcagtaatgtctttgtatgcattaatctgtttttgttgtaatgaaagttcattgagtttagttaccattttatctacaccaacacgtgtatagaaaataataaatgaatctaaattgcctagagtaattcttgaactgaaatttgaaagttttcttgcataaacataaatttcttcttcacttggtaaacgtttctcaatcggccagctttccacaccattcggctcataatcgatttcaaattcaactcccatcactgtgtcttgaatgcgatccgtatatgaaccaccgtaaaaatactctcttggtttggatctccaacgaggactaaatgggtcagttgtgtattcttttacaaatttgtaaaaggacattttactgagcatatacttcatctcaattagtgctttgcggtcatcatcagttttaaactctgctttgagcgatggacttttacacagtaactgaactaaattgttgtacatctttaatgtacgttgttctttcatttctttgattttatgacgttttggtggtggtagcaaagatttaaccataatttcctcctatttttattcaattatacacataaaagaaaagcccgtcaatagacgagctttaaaattatttccaacgtgtgcctgacccagacggtacaccagtactggcaggtatcgctgaaccacgtttcgttgtacttgggcgatatgtcaaaaaacgagtcactttttcagtatcaatcgaagtaattcctgaagttccagtaactatcttaccaatgtaagtgctagttaaagattcatcaatagtttcagtactaataacatatgaagctttcttagtattcctgttcatttgtatatacaaatagaacgtagtattagctggattactttttacagtacttaaatctacactttgtataggtagtctgtcgaaaattccacctaaaaataccggaacttcacgtgtaaagtacactgagaatccttgtgcaacgtcttgtgatactaccacaatcttttctttaacgctaccatttccgctaattaaaccatccatttcagcagatgttgtaccaaaaacgctgaatacagatttggtttgatagtcagaatcttgaaaattgtaatatccaaaaccaacaccaggaataacaccatgttgatatgctgcaccgagttggatgtaactagatgataaaaaacgatttgatgttatgacaccatttactgttttagctatcatcatcttaaattgtgcattacctggttgtgaaaattgatgaactgcatcaacaccaatataaccaaatcctgaatatttagcaactgttagaccagtacaacgtttcatatatgcttcagtaataattcctgtaacagaactaagtgtctcatatctagtacttaccaatgtagctgaagttatgttagatccagataatacaacatcaacttcggcataaattgcataaccttggttattgttaagattatatgctgaaactactgcaatggatttagaaaaagtattatcaggtacataatataatacaatttgtccagatagtgtaccaacaatgccagagtttcctagattagcaaaaatatcttgttttaatgattctaataccgttggttctattgtatatgtttcatcaaattctaaagtatctgggtttaataatccaccacttgttttatatacaccttcaatgaatgatgttccataacatctaacactaccatcggtatcaacaagagaaatcatagcagtgtatgtaaaatcatcacctatttgtttacgattagattgtggtgcaaaaccatttaatgtagtattatgttgaactgagttatattgatatgttggttgtgggcctatttcagaaaaaacagtattattataattatatgttacatcatcatacgtaccagaacatgctaataatatttttctattatcgatgaaacgtacacctaataggtttgcaccaacagcactaccaaaaactggtaaaacgtttgtatttataacgttacttgcggatctagtactggctacccatgaatcaaatggtgtaccattaactttatatctttgtaaaccataaaattcagtagaactccatctgaatttagatgcaaatacaagaccatcttttgtttgacataacccaccagcattacctaaaactccggtagctgttgttccagtaaagtttaccatatctatttcaaatgggtttgtaacttggaagccattattatatgaaacagaagctggtgcacgagccgaaccatcaagtgacatcgatttcgcattaatattataaacaaaactgatacccgttccatacacagtagagatatacaatggggttaccattctatgtgtaggatatagtgtaacacgtattttagataaatctgtactaacatttgcttggatattgaagtcagtgtaatcagaaaactccactttagatactggtgatgtaacttcaaatagtgaatctgaactagcacctatgctatataacttatcaaatactcttagattattggatgctgaataactagtacttcttactgtttgacctgacaggccagttagttttgttaaagatgccatagaacttgctttcacatcacttagttcaactgtatatatagaaagtgctagacctaaattagaaacacttttatctttacaccaaatatatactttagaacctacaatatgaacgtataatggcatatcatttccaaatgatgtacttggtactttagcgtgaatatgtgaaatttcgttgaatgtaccatttgttaaagtgaaaatataattatcttcagtacttaaacagccaagcatttcataaccatttgaacaaataaaatattttatattctcagtactgctcataatggatggtttatacatggtattggtagaaataacactttcttgtgaaatcatggttatatttcggatttctcgtataaaagaataataaaaacctttagtactaccattggtcccactacgcagaacaacggcggttccatcatcttcaataatcgttggctgtactacttgatcacttgacataggtgtagcaccctcatatgacccacttacgttcaatggtaagtagtccatctctcctatacgtgatattggtaacatatctaaaatactttgaacttcagaacgcttataaattggatattgaactattccagtattggcattcggtgaggttccattgaaagtacgcatagcgtaccttcccccaattgctaagttcccaaggatctcagcacttcctataattctttttgatgacattttcttttccttattttaccaaccaatagttccagtttcggatggcttaccagtactgactgggaatgaagaacctttttgtgtaacgcttggtctatatgtactaaatctagaaactttattaatgatgatattagttattccacttgtacctacagtaagagtaccaataaacattataatttctgactcttgtatttgtgttggtgatattttataaattggttcacctagaactaatgttgcatatacgtattgtgtttgtgttcctgatgaaacagttgaagcacgaattgataccgctgggaacttataaagataaccaccaataaatgatggtatttctctattaaatgttaaattataaccagtagatgaaatatttaaactactgtcatcataaagttcaccatattgtgttaatggtaatccatttacaataaagtttacttcatctttagtgatagaggggaatgtacattccccatttgaattagttgggtaataagtcatattattacctaatacaccaagtccagtacttttaccttgtactgtgacttgttgcattgctttaaggtctgctcttattttaaatgccattatgtaatcctttaccagtttatggttcctgtttgtgatggtagaccgtagctaacagggaacgatgaacctgctgattcaagcgaagcaccaaatatatctaaacgtgaacgtttttgtatattaacagtttcgatttgaattgcgttagttttaattgtacctatccaaaaaatattatatgcagttgttcctgtttcggaaataacatcagtagttatgtagtagtttgccaacccttgttctaatttaacatatacataaaatgttgtatttgctggattagattttatagttctcaaatcaatatttgaaactggtagtgtaaaagacttacctgatagtataactggtgtttcctctgtaaaataaacaataaacccttgagcaacgtcttgtgatactacgttaattgggctaccttgtggggtccagttattatagtctgctatcgttgttccatatttttgaaatgacattttatttgtataatccagtggatcaaaaataccaaatccaataccaggcaacgctgtgggttgtcttccttgttcataactggcatgagaaccagtaataacaaaacttgtaaattgtgcagttgatttagttacatatgctctaaattgatgagttgcagtattaccaattgttggatgcgttaaagggtctgaaccgccaatgaagtagaatgaaccaccatcataaattgttaatccaacagaagaagatgcaatcgaaccattaccattaggtgtaaagttatcaccatatgtattttctagtactaaacgcttaaaggtaatagatgttatatttccaactctagtattaacattaacttcagcaattctaatatagtttttatagtcatttgttatagtactcaacataacaaaagccggaatgtcagtttgttgtggaacaaataatgtcatatcacgataagcttgtgaagataagttccagtcactgagaactttagcatattctgtatttctaaagttatctagaactgattgtgtaacactaataacaccagtaccatttaagtttttatcatatgaaaatgattgtgaataacgttgtccaaccataaaaataccgccattagttgttacagttgaacctgaaatactactaatgaaaattctattattggcattatcatctacataaccacgttcagttgtaggttcataaccttgtatggttcctaaagataatgatttaaatgtaaaattaggagtacttttatgaactgcataagatggtctaaacccaccactaccagacgcacgtgaatattgtttagtactattatctggtaacaactccacaccattaataaatgaaccaactgctgaaccaaaggatggtctaacaactccacctttaaaatcagttgattgtactgcacgaacgttaatcatactataaacaatttgtataggaaactttgctttttgcataagtaatggttctgctaagttaggacacgcagtacaaaaagcttctcctgaacttaagtaaaaataagaactataaatgtttcttgcattagcatgattatataatggatcattatttaaaacattacctgtaggcactaatgcagaaccagtattggttataaccaatggtgcttgatatgaacctatgtcattcccagcgtctagggtgcattgtttagtactcatattaaatgcaaagctgtagctatgttgtggtcgggcattatatgtcgccattgtaaaccatgcatcaccattcattctaaaacgaaagttctgtgttcctggttgctgtgcaacatacaaatcaatggatgtcatataaatcccaataccacgtaggttttgtggtacatacacataaggcttatctgctatattagttgaagttacttgattagtaataaccatgttattctgtgcagaataagttgtattatagaatgtttttgtagtccatccagtaatacgagttgccgtatatgttccattgctaatattatatacaactcggacaacaactaactgtagttggttatttgcattaagaacactaaagacatagattgaaccatcttctgccatcattgcaaattctataccaccttcagggcaaatatctgcttgatttacaaaaaaaccagtatgtaatttatcatctaatgtaccattagtaatagaaataaacaatccattagtactgttagatgtatcaatatatctaccgagtaaaatatttggatctgtattatataaaccaattgctatacgattggaaccgaaaaatccaggcttgtattgacgacttgtgttaattgtacggctcatgtcatcaactgataatgcgttagctaaatatgaataatataatccctcaacactaccgtttgtaccactacgtaataatacgagtgtaccatcgttttctaataaaattttatttctacgttgggtctggttttcagatgcaccattgaaatcaccagatacaccagcaggaagatagttttgtgacccataatgggaaattggcatcatactgacgatatctagtacttcatctcttgtataagtatctagctccatattgccattagcatcaaatacttgttcattgataccttgtattgttcttttaccattaactgtcacattatgtgtgacatccaagccaccatatattttctttgacattatatatcccttataaattagatattagttaatgtatttatatacataacaaaaaagcacccaacgggtgcttatgttaaaaatctttatttttatatagtattctttgattatttgaaccacggaaaggtaattttaaattcttttcggactcgataaacttaccatcaactaatacatctaagtactgaagtatatctttagaatgatttttcataatctcatctaaagtatacccactccagcaccaaatagttttactaggataagtttctttaactactttgcatagatttaaaacttcatctatattctttttcattaatggatcaccacctagaagtgacaaaccactaacatatggtttttttagttcctgtagtataatctcaactgtttcagtactgaactcttgtccacttcggtagtcccatgcttcttcattgaagcaaccatcacatccgtgcgaacacccactaacaaataaagagcagcgaacgccctctccatttactaaatcatccttgattatcgtctggtaattcatctaatattgcactcactatttcgacaagaacatcgccgtgacatgatttgggtttacagaaacaaccaaggcgtttccctgcgagttcaagtaattcatcaatcttaacttctccacaagaaatacgttcaataatgtattctctgaatttttcaattgattcttctcttgtactaacaatgaattcggctttagtttgtttatctttaatatgggtaaatgggtttccccatttagacccacgtccaatatacacatcatacggttctttgtatttgttaaccacaattggctttaaatccataatttaccttatttgtgctgaatacgctcacaacactcttgttgtttgcctttattgaatccacgcgaagaaggattacccaagtaaccagaaacacgacgaatcactgagattgtcttctcattacgattatcacataccggacagtggaaaccatgtttatctacactgaactcaccctggaagccacattcataacaatggtcaactggttggttaataccaaaatatggtatcttcgtgtaagcatagttaactaatgtttcaagtgcttgaatgttgtttgctaagtttggagattcaacataactgatgtttccaccgttacttaggtaagcaaagccttcttcataactccatttatcaaatggagaactttctacccatactggttgatggaaggaatttgtgatgtaatcacgttttagtactgaaggatattttgcttcaatacaacgtgcaaatttataacaaagtgactctgctggcgttccatatagactaaaagctatattactctcttttttgaactcatcgcattttactttcatataattcagtactgacatacaaaactccttactgatagaaccagtgaggatttctgaacattcaacaagtccaacataaccaatactaatactagcataaccattgtaaaatagcttgtcaatggtttcttctgcacctaaacgtgctaatgcaccttccatgaacaaaattggattttgctttgctttagtgccttttaaacgctctacgcggttcatctgagcacgatatgcaatattcatatgctcgtctatcttatcaaaaaactctccgtcagaagtactctcaagagcaattagaggtaaattgatagaaaccacacctaaattgaaacgaccgttgtattgttcatttccatttgaatcttcccattttcctaagaatgaacgacagcccatcggtgttacagcagtactaccacttccagtcactttgtgatttaatggtacggaaacaaagtcagggtagattcgttttgatgcacaacgcatagctaactgtttaagatcataattactatcattggtattcatgtttataccatcttgtaaaaagaaaattactttaggaaacactggagtaatcttatctttacctaaaccattctcatggacttttaagtactgttcagtgattaatttaccaaatttagaagtgttaagacctaaactaagagaaataaatgcagcttgaccattagtactaatcattgaattagtttggtaaagtaatgtttggcagccatcatacacttctttacgtagttcttcttcaatgaattcatcacttagattatatttcttttgtttttctaaaagtttattccatgacttttgcacatatggttctaaaccaacatcgatatgtgcaagagattgtccaccgtactgggaactagcaacagcttgaacaatctgtgtcagtactgtgcaagctacactgaaactttttggttcttcaattttagcacaaccaatagtgaagccgtttttaagcatatcaggatagttaaccaagcaacaattggtcaatgggctaatatagtaatctaaatcatgaatatgaccatatccatcattatgccattgcattaactcggtgggaataacatcttgtgaataatgcttagatagaatacctgctagtaaatctctatgtgtattgacgcattttgcatctttattagcgttttcattagtaagatcagtattactctgatttaggaaatttgttacatcggtatataatttatctaattgcattgtacattccttgtattttgaaatcatctgggggtgaagatatttaatatcaccagacaacattatagcgtcagaacaggttatttctcttgacctatatcaaggaaaagtcacattgctttttatttgcacaaatagaaaaagcaccacaagggtgcttttaaagtactgctaatataacaactgcccaaattagcagtaatacattggttggtgcggaaaaaagcatatatgcagcaagtgcactgcaacctatgacaagtttagctagtctcatctggactccatgtaatagttactgtgaacgtcccttcttgaaaaccaaactcatcttgtgggatttgttcagctaatgggttaaatcttgaatcgaaggcttcatgcacatctctctgaatatcatagagactttcaccatcgtattcttttttaaagatttcattctgcattgatacgtaacgaccctcgtattatgtctggatagccatcaaatagttcaataagttggtttaacgcataagaactgaagaatggattattctttgcaatttctattcgtttttcaatatccattaatataatctctggtctactgaaattacctttacgtctatatgttagtaaacgctctttgtgtccgttgaactgaaattcaaaatatgttgatgatgtataatcacttccatcaggaatcggaattgagaaatcaacattgtacttataaccaaatgcaaaaaaataaccaccatcttcgaacggtatagttgtatcatttaggtggaaatctatttcatctcctaatatatcaaatatcttggtacttagagacataaaatcatcggctaacatttttttaccttattttataactcgacagtagtactgaataatgtaaggaaataatggattattcacgtatgtagcgaaattagctattgtaacttttttatagtacgaattatgaattgttataagagtgtggggatctattgattctctattagagagttcaacataacgcccacacttcatataagccttaccataataatcgtaaattatgtcatatttttccatttattctggatctttgtttttatcaactgtgttgtttttattcaaatcaatttgtaaagccattgcagcttcagcattttcttcatgtgtgccattgaatttatacccattcttaatgagattcactgtgtagtacttattgtaaagaaatgcccacacgaccattgcaattgtacccacaatccaaaatgacactgcgttgaggatgaagtaaattacaaatgcaccgatgaacgtaataaagtcaccacgaaacaatgcagggaacggtccaaagaataatgttgtccatgagaatccaaagaaaccatctttgcgttgtcctacattttcattttttaaagaaatagttttagccattttaatctcctacttattatttgggtttggtatacagtacacatatactagattactaaagtgttcagtactggaatattttgctaactcagtaatgtgaaagttcttgtcataaaaccttccactattgtatgttgttatttggcaacaatgtataggtctgaaaatataataataaaatatatcattttcaactacaacagtatggtttgtataacgctcgattttcttcatgtgtggataatttccttaaccccgtattccataattgctaatgtgcaaatttcacatggtttagcaggtacaggaataccatctttacttatccgtgcaatcagtaaagtatgaacatcagcacgtgcagctaataagcaagaaatttcagcatgtagaaattcaccttgtggacgtccagcacgaattgcaaaacctttctgtactggatgtgtctgtgtataagaatttgtgcgtgttgccagtactcgaccttttttatccagtgcacgagcaatcacacgataccgcttgtagttccctacttgctcaataggtggcatccggcgtaattcttcaacaagtttctccaatttactattcataagtctaagtctatacccttttcaagtgatttttctagaacccaaagtttacattcttcactctccaaatgtatctttgcctcttgctgttcttctattgtacaagactttatgaatgcacgcaaggcttggattgtattttttaaattttttatgtcatcgatgattttttctttggtttcttcatcgatcacacatgaactccaactgtgtcgttcctcccaaacttttttagtgggattataaattgatgatgtcgaaatagctacatggatcttattaaattcatcgtccgcttcttgttgggtgtaatcaccatatgttcttagaacatttttgtataattcatcaatggcctcttcatacgtatcaccaccacaatccaattcataatcatgtgcttgtacccattcgtcgtcttgctcaatatacattggtgaaagaaattctacccaaaattgagtctttgtattcaatgctttgaaatcttcaattcgatttgtcattggacacacatcatgaggttctatatcaatcctagctggaaccatatctttgtttatgaatttaggatgacccaaaatccaccagtacttttccgatgtagtcataataatctccaattaaaaagtactgcacacgatggcagtactgatgttaaacgtaacgtttctttttataatcataccctactgctttgtaaaattcaaacaaagaagcatgttcaaatgtaggtaatagatcatatgggtgctgatagttcgcaataccaacaatagccatcattgaatcagcagttcttacgttctcactatcccattcatctaaacgccaaagtgagcaaagtacctctcgttcatgttgcttacccagaaagaatccagcttcacggtcacgaaatgcacctacactgatagtacttttgtaccagtctttttcaccatataatggcatacggataatatgtttttctttagcttctccaaagcgatgaagaaatgctacataatcactcataatttataacccattacaggtttggtatgatccggttcgtaagacttttcagtactgaaccctctgaaatttccacgtcctggatttggacaagccatcccttgtattgaatgcttacccttatatttgccacaatttttacatttgtagccaattacttctttcattgtgcatccttcggaacagtattaagacgtttgcgattcactatcttcctgcacatgaggttaagatcttgcccatgacgcatagtatgacatgcatatagtgttccttgatgatttagttttgttaaaccttgtcggataatttcagcatccatctcatcaactttaggagcacacccacttagaaataccatagaagaaacaatagcaatacacaataatttcatattttaatcccctatacataagtattcaattgaaggtctgccattaattagcataatacctgaatgagtttgtacacagtttgtcggtgctttttcgaaagcagacatgtaaatgtacttaccattactaactgaacaagataataccataactactgctattagtacaagtaaaattttcatatggacctactttttatttttatgtaactcaatttgtacacgagtaataaactcacgctcaacttcttcagcattgtgtccttcatattgtgtcttgaaaagttccattgcttttagtgccatctgtacagaaatgtctgtaatactttcagtactggtactttcaaatacattttgaagactcaactcaccatcacctttcagtactttttcaggtttaggagtttgtacttcttgcttggtaatgtaacgtagtgctttcaactctgctttggtgagattgttaacccaacgtggctcattcaacaaagtatccatcttgataccagcttcccccatgagatgaatgagttcttgatttcgtcggatatgtttctcgtcacctttgttgtttttataagtatatgcacaacgcataatagctaaacgaacttcaccagctttagtaatggtgtatgtatggattgcatgattgtaatcactttcccatttctgtcctgcatattcgtaccaaagttcattagtatcccaacgaatcaatcctaggcttaatagagagtcaagcattttagccatatttccagtgtactcacagctttggatattaaaaccaccattatattttgcgaaatacagaatcttttcctgtgatacatttttcattacatgtaatccttaatatattttagtagcttagatttatcttctgcacttaatgatttcttgttcattaagtgtttcatttcttgacgttcaatttcttcacatcttttagattcagcttcaattcgtgtattatattcttcgtcagtttcttctctggtccaaattacattgtatccatgaaaaccgccgtaaccactgtcgggtgaaagactaatgtgaccgttatattcagcacgatacttattaagagtgtcaataaaggtatcaatgccacacggttcaatttcaatataaccaatcactacagtaacgtcaattttgttcataaagttcacctataaaattagggagcattagctccctttgtattgatgtttacgttttgtactgtatttccagccagtactatgtcttgttctgatatcgtcccaatacgatggtaatgaacgcatcttacgtcttccacgtatatcaggttccccctcatccttcagtactgcacaagccatacgacgctcttgttgagtcttaggacgcttgtatcgggagtggttatgtttgtacatatacgaacgcttatgtcgccattccgtatcacgagctttacgtttatgttcccagtactcattatagagtatcatgtattcacccataagtaaatcaggagatacaagtaatcctttttcagtacaaagataataacccacaaacttttctggaaacatttcgtaatagaaacggttcttccaaaatgtttcacgattctttttgttgaattcagctaaatcgaatttcatcttactgtggaaacggtctataccgtcatgttccgcaatgtactctaacagattatcaataatctcaactttaccagaatcgtgatacaacgtaaatgtttggtcaaaaaacatatgaaatctcctttaagttaaaataacctaatggaaagtcattcttcctttaatacatgttctcatgatttgttccttttgtcaagatatagatataaaaaatccctgccaaaagacagggacgaaaaactgaaataacacatggagttctttttaatttaataaaaagtattattattcttataaaagtatttattaagaactccacaatattgcttcaaatgaatcaaaaacctttctgagctactagttcacggtactgtgcacgagttagtacaccttgcttgcgtagagcttgtagaccggatagggtttcactcttacgttgttcgtacatacgttgttctttggattgaataactttctctttcttaacttttgctactggttcttgtttcttaggttgtttagccattttatatctccttctgtattatgataacaacattatatcatgtatgggacataatgtcccatacaatattacatattttcttcagcaaattcagccagtggtgaacgaacaacaccttctagttcgatgacacgacaacctgcccagtctttaaacttctcagttacatatgtcaaaccactgttaacaggactaataaacttactgtcaatctgactcaagttacccataattactactttacagtttaaccctgctcgtgtcaagatggtttttgcttgtgcaggtgtaatgttttggaattcatcaactactagaatagtgttggtgaatgaacgtccacgtacaaagtttagtgctttaaattgaataacattacgtttcataatctcttcaatactaccttgtgggttggcatcatctttatgaagaaactctaacgcatcaatcgcggctccacagaatggaatcactttttctgcttctgaacctggcaagaaaccaatatcttcaaactgtgagtcttgagttttagagaagatgattcggtcgtatttacgtttttccagtactaattctaatgcagtagcaattgtaattagtgttttaccagtaccagcagaacctagtagtactgttagatgtacatcaggatcgagaatactgttgatggcgagtgcttgttggatattctttgctttaatatcccatactttagcacgtaaagccactgattgtccaatgtcttggaataccaaaatatcttctggtgttagtgttccatcatcttcctcaattgctgattgtccttcgtacacaaataatacgtcagcatcatcatatagataatcaccgatgcatagattttgtggaagcagatgttcaatcaagcttttagaaatgtaatgatacaaacgacgaccaacttgttcggattgaatattagtattggttaagttgctgtatacttcccaaaaattgatttccagatggtgttgaccaatgtgaatcaaatcactatcaccaataacaatatcatggcgataatcttgtacctcgacaccataacttagtgctttgatacgcatgttgatatcacgagttaccagtactgattctgttgctaaagctaccagaatgattttatcatcaggtacagtacttttgagaagggtttgaactttctcttctgtacctttagtacgaattagtgcctcagcttcttcgtttgtaataacaaacaatttgctatcaggattcatattggtatgaacatcagcaatattaacaccagtactactaatctcgtcatgtgatgcatctgcaataattgcttcaatgttacgaatagcaacacgagcatcgcgtgaaacatctacattacgactcttaatcgaatctaattcttccagtactgtaaatggtagaatgattgcagcaccatcaaaagcaatagatgcattagggtcagatagtagtacgtttgtgtcaattgtatattttttcataaaacatccttgagttatgagtacatccttgtactcgactaatgttattgactcggattattacatatttggttcgtattcaacatagcaacgtgaacctcgaaccttttcttcccagcactcctggtaaacaagttgaccaattgaaactggttctcttgatagtccattacgtacttcaccactttgggttttatacatgaatgaacatttggactcgctacattgtcctaaactaacaacttctgcggtattgtagtgaatgttggtacgcttagtgttctcgtgatactgtccgaaccaaagaactcctgcacctaacagaacagtacaaataagacttttgatgtgtgtttgaatcataatgcgttaaatccattgtttaagtatgtttcaatattaattttaccaacaggattactactgtgaacaaagtactcaaacggttctttaatattattatcaaacatataatcaataagaaacttagcaaaagaatatccagtcttttcgtcttcgctcacatcacccaagtcatggtcgaatgatacaaatgctggaattccattttcaataacatattcacatgcacttttaaagtcacgacataccaccatatcttggtttggataatatagatttgcatcacgaatatcatccaaaaacattgagtaagacatgttaaactcctatagataactaattagtaagttttctttttgaaccagatactccaattcttgttttgctgtaccgatgaagttctgtgtcataagattattatatcccgcttctcgattttgtcccttagaataacgagaaatatgacataaatttacaccagcaacttcagcactcgcatgtttagcattagtgtatccatctctaatgtgtttcaactcgtcatagcttacttcatagctaaaactatgactgtttgcacctgggtaaatttcaaaagttttgagtggtcgaagatgggaaacaaaaatattgtaatccatttcttcttgaacttcacgacgcaacgcatcttctaatgagatatcagtactttctactgttccaccacatccaccaagaagaccatcccatcgtaattgtagtaaaactaaatttacttctggtatatcattcaactcatagtttttgtaagggttacattttcttgcaaagaaataacaaaatacaaaatttgcacgtgagccatattcaccaaagggaacttctttaacaatcatttcatacgttccttaattatagtctctagatgtggtattgctttggttgctggcttgataactttttcattaaacaaaaaatcattatcatttttacgaatgttaacattaacactataacatggtaatgctgctgctaatctcgaccataccagtactgtatcgctactaccaattacaataactgtatcattttcattaagagatttcaacacattatttcgttcttcgtaaattggtaagcgtataccatcaacataacgatgatattctccaatcattactacatttggtttagcaaaaacatcatgttttggtatgtatggttcgtatccgcagttaataacattataatcatcagaattgatactataattttcaataacttcgcacaagtttccatgaagtttaagctcatgaccaccaatacgagtataaagatcgtccatgttagaagtcatatgaaggaagcaatcaccatattgatcttctaacgattttataaaataatgcattgcatttggttcgcattgtcccaattttacacgtaatgtattatagaaagaatgaacaacatgatattttgtagttaaactagcaatgttacatacatcattaattttaaatgtatcccacaaaccatcatcaaatcgaaaaggttccatcccactttcaacggaaagtcctgcacctgatataatcagtaatcgttttttaccttcattgcttataaatttttctgatatcatattcaatccttataaaaaaccaattaaatatattgataataacagaatgattccaatatgataggcatacataaaattattatctttgtgataaccattggatttcaagtccctgtataagcatttagcattgttataaattacaacaataaaaaaaactataaaaaaactcaaaacccattcataaattgtgtatgccatcatctattctctcttataattatataattttaatactttaaaacatcaaactcggcacttacactagttacattatcactgacaattttaaaaattgatttgatgcgttcatgtagtggcacttttgattcattttcaacttcaatatatgcttgcattgctgcaatagcatgatatgttccgctacctacggcggtgattcgtgttttcggttgaagaactgaaaaatcttcttgaacttcataaattgtatgattgtgaagaatgatgaactgtccaccacctacttcttgtgaaggatcacgagaaccccattcctctttgaacatttgacgaataataggaataactttcagtactaagtactgtggaaacgtctcatttgcatcttgctgtggtagattcaaactgtaagtaagaagttgacccatacggaatgatgtggtgtaaccaatcgccataatttcttttgtacgggtcaaaccagcatcatcattgattttaatgaattctttctcaaatactttaggctcagtttgaacggactttgtgaacccgttacttcccagtttgtcccctgcaataaaagaagttacaccatcagtgtgtgcaatgatacatgtcataaaatagctccaattgcaaataaagttgtatataaaatataaatcaatgtacctaataacattagacacaccaaatatgatgttgccagaacataataaattattgcttcaaactttgaattgaacttcattgttgtgttatcaataaagccatttttgtaatatttgtaaatgaaaactgttaggaaaagtacagtaatatacatcactactgtagcataaaaaataatagatgtcaaattttggatgtttgtcatagttatataatctcaatataattaataacaaaggaagtacatcataatcatcctgttattttaattatttttattgtttgactgaaccgtaaaaaaccagttctggttttgttaatattacaacatcttcaccacgcgaacggctaactttatatagaacgtctggtggaattccatttgcagaatatagtgtaaatagaaaacctactttagttgccatttcttcagtaaaagttgatagctgcctaactgatacaaaagaattatcatcgtctttaacattacttttaatagaaatgttatgaagtcccagtactgagcgatttatcatgtatcgcttttcaaaagctacactgaagaataccacagtacatgctgagttgcaatacctagaaacaattaaatttataccattgtctctaacgaagtttgccattttaatcccagcatcaaaatcaccacctggcgatgtgatggtaatggtatcatagtgttctttatcatacaactccatcatacgctttagtgacccatccgtaatatctgagatgaaatatacattacgtgtttcaggattgtactttatcacatttttactttcaacaccagcactggctggaaaatttatcaacatcagaagcattactgcttgtactacctcaagccatagtcttttcataacaaatccttaattttggttaggaagatataaataatatagtacttaaacacttaagtcaaactttttctgtacttaactcaaatttccctcatctgataatccccttagtacaatcactgtgaagattctatcacaaacccataccaaatgtaaagcttttttataaggagtgcccttaatgggggaaccaatcgcaggacaagaccaatttccattcactttaggtggatatttagttgacggtgtaaatataaaaggtacaacaatctgtaaaagtagttgtttattaataagaggaaataaaatatgaaagctatagcagcacaaggtaaattaccattcaatatcggcggcttttgtgtaaccgccgctaatataaacggtgaattgaaatataacttgaacatctttaatcaacgttctagttgtgtttacgatcttatcgacactgattttaatgtttatcgttttgtaactataacaagttttgataaagataaaatcagattagatgcaactaaaactgcactagagattgcaccaactttagcaaaaaatactttttgtattaagattgatgatagtgcatttgccgaatcattccagtttcataaaattaaattgagtactggagaaatgaaatatcacccttgggatttgtattattgtaacatccctggttaacaaaaaaggagccttctggctcctttttttattctacagtattaagcttctgacaaatcatgtcagcttctactcggtctttataataaatggtaaatccaaatctacttgttacccttttctcactacggtgtatacagtttacaatatagtacttattattttgtgcagaaaaacgcacttcatagtttcgttgagaaatgtcattatcatcaataacaaacattactgttataaaaaataatactaatattgatagtaatccaacaatcataaatgtcattgattcatacccttgtcataaatgcagttaacaataatcccagcatcttccagtactttaatcgcttcaggtggtgttcgtggataacttttgtgataaattacacgggtaatcccactacctgcgattaacttagaacaagtatagcatggttgtagagttgtgtaaagagttgctccttggcgttcagtaggagaactatacagtaaagcgttcatctctgcatggatctcatgaatattactccactcatgatgttcatgttttgctgcatcatcaacccagtcttgaaaacgaccatcgttcactaaatgttgatttacatcacaacagtttggctgcttagatggcgttccattgtatccagtactcaatactctattatttttaacaataacacaaccaactttttgtgaaatacatttactttcctcagcaactacttctgctatcttcaaccaagtcgtatgtttcattataagctccaatacttaacaatgcgtttttacacaaatcatgaattttcataactcgaatatagtttaacacatctgtttcattaatttcaaatggtttatctgcatatgtagaccatgtttgatttaattcaatcacaaatgtaattttgtctgtatccataatattatcacaaaatctacgaaaatcttgctcttcatcggaaagtctgaaatttaaatcattttttaaaccattaacagtgaagcaaataccagtactgtaaccgatgcaaatatcttcaatatcatataatccataaattaatttagagataaacgtgctatatttgtttctatgataatagtttaatatttcttgtttaatattaatttcaatatcagtagttttttgtaatgtaagtttaattaattctaatgtcttgattatgttatctaaccagatattagtatcatctatacttaggtgtgtgtatttcattatgtccctctagattccaatcatcaacgagtttagaacaaacttccatatgattatagtacttttcattcaatacataaggtttattatgatattgacgtacatcagtgaatatatcataatttctatatatgaatgacatatttttgtgcatgaattctatagttttccaaatcttttctatatcatataaaattgtttttaatgataaacctgtaagctttgaaattctttcaactttaaaaccggataacatcatagtattattgtgtttagtcaaataactatatccaattgaactatgtatcatttctacactatcaacttgtgttattgtttttaaaaatgactttaaatttctattaaaccaataccactttttgtttttattataacatgaataccatttcttcaatatatcaattgcttcagaattaattttcaaagcaaactcatcaattaaaaacatatgatgataaaaaatatcactttgttcttcagttaaattatattgctgcatattcacctaccctagtaacaatgattccttgggtatttagcttatatagatcattttttgatcgatgaaaattgatatacagcaataaaaagaggaatccagtactggattcctatttgtaatattatttttgatatggggtgtactgatatttttcacaatcagaaacagttaggacaccttcatcataaccatattgaagtacaaggtcaaatgctttatcaaccatagcaacaacatctttataacgaacaatcttatgagattgattctcaactgctttcataatccccattagcaaccagcgaccttcatcggtgtgtaatttagcaaaacgtggacgctttgtcgctgccataatatcagtccattcagctttaaaaatgtgtggacgttttggaatatcatatagcgtagtagggaaagttacattatttttcttcattgcttctgcttgtgctgcacgatagccctgacgatataatggatgctgcatttttagctgttcagcacttagaactacttttgctttgtatgcgtcataaccatctttatattgtgcattggacatattattcttttacctcatcagtttgaatgtattttttgtcagagaatgtaccgtgttctttacgcacagcttctgcatgttgaaccgcatcaactggattaatgttctttttaattagtacttctttcattaattcaagtacaattgcaaaaccattcagtacacgctcagattcatccacattttttaactcaagtgctactgcactaatttgatcgaacgcaacattaataaaatcggaatcttctaatacatttgctacttccgtattattacgtactagtactttcatataatctccacaaagatgatgccccatattgaggcatcaaaatctatcttacacccactcttccacaccgccgcgacgcttaactaagtacttgccttcttcgttacgtggtccaagaataataccatcaatgaaaccatgttcaccatattcaagtgcttcttctgcatttaaccacaaatcgcggtcagcatcttttagtaattgttcatgtgatacgcctactgcttctgcaatttctttggtcaacaatgtattcagtgcatcagaatgttgtagggaaatcttctggtctgtaattagaccttgtgtaccagaacttacttggtgacacatgaagtatgagcgtttaccacctaaacggaaacctttagttccaataacagattgtgtatagcaacccattgatgccgcataacccataactacagtgcggattggggaaatacaagacttagcaacgtctgcaatacccaaacctgcgtgtactgaaccacctggtgaactaatgtagaatgtaataggggaatcaccttgtgagtctaaccacaccaattgttgtttgatgatatgtgccatttgatcattgaaatcagtatcaaggaaaatgatacggtcttgcatcatacgagatgctagatcatatgtacgttctgaaccattaactttctcaactacgtaaggaatagaaatgttacgtacttcgccattagcataaccaccaaacatgaattgttcaaccattgttaatttcctctattatttcgttgtagtgagtattatatcactaagatttaaaatgtccaaactattttactggaatatttgaaaagaaatcagtcatccaatacgccgtttctttgttgaataatactggatcaaacttaagtaactcaacatgacttgtatcatacacgcttgtatcggtaatgtcaaacaaagttttagtactgaatagtgggttactcactagaaagtagtaatcagcagtagtgctaatgtcatcataaaacacaccgtcataccatccatcatcatatacaaaaacagaatcgtcatgaagatagtaaacttctatatgcaaactcaagatcttcatggtttcaatcatttttgccgtatgaggatttaacttattgacagtttcaaacacataagagtgtttttcattcatatcaacaaatgaaaatattcgtactgaacgtatattcatattactccaaataaacaagtgaatttatgaaatcatatttcaatttatcatcaacataattcaaatcaactttaatcatcggagcatgggaacgtatagacagtgtttccataaagtactgattaagtttgtatgtatggaaaagatgaatatctcgtttcaacaccaccattacttccccaaacagatcacagagttcaacttcagtgttagttgggtcaaaaccataacgattctttaatgtacgtggttctttatttcgataataatgcacagctttattactattcactaacaagtgatgatatgcattactataaactgagcaaataactcggcttggataattggtatattctggtagttcaaaataaatcaatgacactgtatcctcacattaaatttcaaatacaaatttaggattgtaatcaaaattctcacaagctccactatacgattcatagcctcgtggattacaaatgatacgtgtcttaccaatgtggtagtcaaagctactatgaacatgaccatgaatccaaacatcagcacccaaatcttcaatgtactgatccatatcggaacagtaacaaccatttagtgaatcatttttatattttggtgaaacactttgataacttggtgcgtgatgagtaatcacgatgaccttgaaatcattatcatgcataaagcgaacggtgtcaatagaatttttgataaattgtttatctttgtgatgcataaactcagtatcatcaggtgtcagtttcttacgccaaggctctgatgttgttccatgacggatatgtttgtaatcgttcatcttctgacgagcatcaaacttcgtcaaagaattacctttatcgaagtctgtccacagagtactaccaacaagcagtactccatccagccatacaaatttgttttgcaaaaagatgaaatttggaatctcatcttgcatatcggacagtacttgatgcgtcttttggatattggaaccgtagtattcgtgatttcctggaaccagtactaccttatagaactgcttacacagttcttcgatcccagtacgataacgactgcgtttaacttcatcaaagtcaccagcaatgatcagtactacatcactgtaatcaccgctatggaggtaatcagttccaccgtgtacgtcagatgttacaacaaatttcataattacctccaataaatgattagctaagtgcttcaatgatactgttcgagaatacctcaacagcactatcacgaatttctaaaatacgagtataatcgtcacatgtgttcttgtcaaatctaaattcaataaacactggtaaaaatagtgatggttcacctgtacgcttgtcgattacaatctcattgcactcaacggtaacgactttaccaattagttcttgcattcgttcccaaatggttttgaacgtccactctgcatctttctctttaatacctgttcctacatttaccttcagtgtgccacatgcactttcaagttgtaaagaaccaagtgaacctttacgcttaccttcaccttcgttgaaaccaacaatacgcaaatccaattgcatttttagttttactttcaactgcttaggagatgtatgtgatttccagataccatcttcacatttcagtactgatccttcttcaccctgaaccatgagttcgttattgtactcaaatgcttctttaatgttttgaaccttacggtatttcaccatacgtacaaaatcactacccaatacattgatggcagattcaagaagttcgcgacgttctttacgttttacattccatgtaccttcacagaatgcatcatacggaacaacatcccatagtacaaatacagtacgcattgcttcattctgactaatactatctttaccagccttctgaatgataccattaccagttgttcgtggaagaatagtttcaccgtcattatcaagtactagaccttcacccataaagacgacaccactactaaaacgttcatcattcatttgaatttgatgtgcaagacctgccatctcaccatcacgacaacctaagaagtcatatagtttaccattacgggaggaagaggtaagagcaccattaatgactacatggtttaagtactgaccatccatcttgacctcggagacagcataaccatgacctttgaagttgatgttcttaacagtctttttatcaagcaaagaacaacgcatatatggttcatctttaataaatcctttaccaaatacatcattgcagttcttttcttgaataccacaatctaagttctttgtaagcatcttacgaagaacttcagcatcatctggactcacactacctagtactgaagcaatgaaatcacgccctgtatgtcccgtcaatgcacgcttatagatgcattctagtttatcaatagcttcatccaatgtcatatgttgatacacgttatcagcgtctggtagctttttatacccacttacaatactaggatcgagtgtatatttcagtactttttgcaaagttacattatctttattttgttcaagaatagcttttttgcctagagtactgctagtatttttaatgctttcaagaattgctaaaatgctcattgtatattcctttatagataatactttccaatataaagtggattactaattgatagttgaacgtgacacggcttatcttggtagtaacgagaacttgatgtttttcgttcatttggtggaaagaatggtgaacgataaccgttccatgtactaaatgatgtgtgctcattaatatcaacatccattgacataattccattatcatcaatttgaactgggtatgcactaaagcgttcaaatttatcattataatgaatattataatccccgctacgtccataataactacgtgttgtattattacttacaccaaaaaatacgcgataagattgttcattatctttagtcataaatggtacgttctcgttgaaacgtccattattcataagatcatcaacatttatttcttcatatttaatttttaggtcttttgctttaaatgatttattgtgtaccagtactggaatgttagattcacctaatgggttatgtctgtttgttctatagctttgccaaaattcattagcaagtttaatttcttcatctgccgtagtcttcttattcaagagtgcacgaggttcaagattgtaattatccaaacgttgattcaatgcataagttccacgagtactgttaaaaagtaaatgataaactgaacttttgtcgggatatgcaaattctttagttttctttatacaaattgcatgtactttaccgcagtaatagtaatcttctttaagataagtgaaaccatcaccaactttaagacctgctacagtttctttttgttgttcttttttattttctttttcaactaacttagcaaacgtttttgttttaccattaattaattctaagttattgttgaaaaacattgggtctacaaaaacacctttgattatatcgttattgataattaaatcattcatgttttttgcactaatcataaattcaaatccttctgggtgacggatcgtgaaatatgtttctcgtgcatgagttgttaatttatcaactacacaaaatcccgtggttggaacgttgtcaatatataacgatggaagattgttcttctttgcccagtactctgctctctctttctttgtttcaaacgcttttgtatgtgattttgttgcatcgataataaaaccatcaacttggttgtggtttacataggaacgtgcaacaaataacttctctggaaaatccatcaaatagtcctcattgtactgattgcttttagtgtgtcaaacaatgcaccatattttacttgcattagttgatcaccagcaggaagattcatacgcataacagccatgtcttcaatcatttcagacgtacacagtactgctacacaggtaatagcatcattcaacccagcttcattgaatttggcaaacggaactttcccctgtttgctaaggttgttataataagaatttaatttatcatgtccaccagcatttagtactacaatagtttcgtgttcatagtaccattcatcaataatagtactgaaagcagtaccttcatattctttaattagtttaacaccagcatggaatgcttgaataccagcttggacaccttgacagtacatattagttaagcaatacaatttcatttccatacctcttgtttttctacatagcctttcccatcacagtgtggacaagcataaaagctgcggtaatcttctgacggtacttgttgtgttccactacatgtaggacacactttacgtgcacccgaaataatacgttcatggtgttcagcttgtttagctgaatcaaaaatacgaccatcttcagtttggtatttttctaccataacttgaattactttcatttctatttccttataaaaatgttaaatcttcagtacttaattgtgataatttaccatcatattcaatttcaacatatacattttggtcataaacagcaactacacgtttaataactccaatcttcactacattctttttgtaattgaactcaactgaacaaccaataagtttatttgatagaatctcacgtatttgattagcatgatcttttaggatagaattaatagattttttcataatatatctatcattcaaatattttttaactacatcatgcataattattaccttttgaaacgattgaatgagtactcatctttttctttacgtaagtatctcatcccaccactttgtggagtagcgagagttaagtcacccgtcaagaattgactatcaatccaaatgcgattaccataaatgagtggatcagtaactgctgtatgtccactaaagacacaatgcactccatctaacttaggtgcataataggtattattcgttctacaataatcgaatgttttcctatcccacaagcacttatcaattatatcagcactaagtgattttgtcccattaacaaatcgttcccatgttgtatattccaacggaactccagcatgaactaacccaatcttcaagcctcggtgattgatttggataatcatagggagatcttttaagtactgacgaaagaattgaatgcctgttcctccaacttcatcaaggaatttatcaccaccattacttatccaacaatgataccaatctcgaagtgtttccgaatcaacgcacatcatctcatgattacccgcaatcatgtaacgattttctccgaacaaaaattcaaaaaggagctttgaattttgttctccacggtcgataatatcacctacactgaaaacataatcattgtgtgtaataccaaattctttcactgtagcatcccatagtttaccattaccatgcaaatcacctacaatgtataaatctttatcatcaggtacggttacttctaagaaatgtttcattattactccaaccatataatattagtgtgtttagtaacttgtgttccagcaaaagaaccatctttaagataagtattaattttaaaacgccattcaccaccactaatatacatatcagtaataatatattttccataccctctggagtttattaatcgtacttcttgaccaatatattttggcttcagatcatttataaaatcatcagccaaagacataagatatcgcaaatgtgataagtcgttgttgaacattatttctttctcttatatttgttaataatatcttgggtaagtgaaataaaaatatatactaacgttacaggccaaataatagccatcagtgctgctgtttggagattcatgataatcatgatttcatctttaaaacaaccccaattaagtactagaaagttggttataaatgtaacaaatgctacaaatccatatattgcgaaaaatgttatcataattattcctcatcatccactaaaacaagataatccaaactcaactctgtatctatgtaacaatcacaattcaagtactcaatttcagcacctatagttctcccattcttaaatatctcaatgattttcattctagtattgggattaatgtgttcaatgtcgtattcgtattcagggtcaatatactgacttgtcatacgtttgatgtattgttccgaatatcgtacagttttacctataagatcattactcaacgtctgataaaaatcatcttgaattttgaataatgacctataaaaaatattatgttgaattagtggtttcattgacattaatcacaacttccagaagatgaacttgaatcagaactagagctatcataggaacaagaatcagaggaagaactgctgtgacggctataatcactgtaatcatcattgttgtagattggtgatgttacgattgctgctgcggtcgccgccgttgcaatttgtgcagtatggtcatgaacacctagttgtggttcatccttagatttacctttgttcttacctttagtgtaacgagctttctttgcagttttagtatttttctgtgctttaggagcttttggtttcacatcttcaacgactggaactacattcactacaactttagggtcagtttcttcaagtgtattatacactttaacttgcatttgcacttcaacttctttaacttctttaacttcttctttaacttctggaataactgtttctggtgctggggtgattttatcaagttctttagtaataaagaagtttgtatttttctcacctagcataacaagaagaccaatagcaatcactggacttagtactgtaccaagtactacataacctagaacacttctgttatagttatatgcaagcataccagaaataataataccgattacatatgcactgctaagaatgattggggttaacatattctactcctttgtatataaatttatcaatttcttcgatgtataaagacgtccctgaacgttcatttagaactaaccaagcaccaaaaccacatcgaatctcggatatatgaaactcttctacactataattcgtatacgcattaaatggacatatttcatcagatatacttaccacatagttattactaattgaatctaacacctgggtattgtataaattattagtactgaaaatgtgcaataacgaactagaaagcatctcggttgtcttttctaaaattgttaaaaacgaaccattcacttcaacttctccctattggcgatgtaatcaaattatatcaccgaattctgatacgtctcatgatattcgcatttcatctatatataatgaacatgattcagaattatcgtctaaacttaaacctaaatcaaccattaaaccacaatgcgttccccagaatttttttatgtatagttttttgctactattacctaaatcataaacatattcatttttaaacatactttttaattcttcacatatacattttactatcttcattaattgattatgatattcgtatggtatcccatcaagttcgttaattattaatgcaaaaccattatcatagtactttagcttattgaatgtttgtatatccatttaatatataatctcactagcttctattgtgtagacaccatcatcagacattaatcttactgcaactttaatattactagaccatcgtgcaactatcaatccaataattataccatcctttaaagtaccattatggtatcttacttgtactttagttttgttatcaattaagtatcttcgaatataatgaatttcagttctaaacagttctaaataaacttcactatattccttatctgaaccgtctgaacaccagtacaataaatttacttgttcaaataatttttttatattcataaaaatctcacagatttaatattactagttacatgattaaaccaagtgttatcgaacttgtaaacaattgtattaagtgatttatgaaaattaacctcagacaccacagccttggaaccattgattacacagatggttgacggtaaattatttgataatatctctttttcatctaaagatagtgaactaatacaatcataatagagaggttcaagaactttttcagtactgagaaattcaaaagaaagatcatctattagttttatgtaatcgaataaattatgataatattcattcattgtagatccttttaaatttagcattattagaatatgtatatgaatgaccaaaatcatttacaccatgtacatttagtacaccgtcactgaaataaattcgatcaatagtgagttcacgtttataatcccaatcatcataccagcacagaacacgaatacctttgtactttgtagttaaatcattttctaatatagtcaagtaatcaatatgacttttgaatatctctaagtcctgctcaaacatcattgttcctcgtataattctatatcatcaactccaacttggcgaattgcagtacttctgttgaatgtatttttttcaaacaaacatactgttaaacgtatttcacacttcaatgcactgtaataaatcatatcaataacaccatatgtttcatacatttctacgtatacatttcgacctaaatacttttcttctaaatcagtaattagactattgataagattacctatctgtgttatatctgtgtgaaatttatccattataataaacctctcacataaaacattgatgaaaatagataatcattagtacttgtgtttagttgtttagaaaagttatattttttatctttattttcgtataaagacaatctatagaacatttctatattttctaagtattctttttgtaacaacatctgtgtttttacattcattataatataccttaaaagaaaaagggaccaacatatgatcccttttgtattagaaatttccttctgcaacttgaaaaactttcaagccaagtagcttacgccacatgaatacgacttgtgctcggtcatcatatacctttttaacatcgtaatgatcaaccacatttttcatgtacaggtcgaattttacaacatcatcaggacgtttatcatcgatatctcgcataaacaatgcatcgtaaggaacaccccaattcttaagccactgttcggtatcagcacgacacccttcagtacgcccactcatgacgataatcttgcgtttatgaaaaactgcttcagcgataatagacaaaataacttcttcatcaggtgtatcctgaagaacagtactttcatcgaacgggttacgcccccatttatgagcaagagttccatcgatatcaacgatgatagcagcttctcgtgaattaccatagtaaccaatgtgcatggccttactataatagtacgtatctgccatagtgtcaatgatattatcttgtactgaacgctcacgcatgaggttacgtttcttacaaagttttacgaactctttaatcttaaagaaaacatgaacatctgcaccacgatcttcattcggtacaaaatcttcgtagaagttcttttctttgtagtcgtattcattatctttagcccaacgtttccattcatcacggaaatgttgtttaaggttcgtatcggacacaatgatgttccaaccattctctgctgctgaatttgctgcactgaactgcattttagttacgtactgctcattagcgtcgttgaatttgtatgcatcatgtgaccctgccattgattctcgaatgtcatcacggttaatgttgatagtcttcgatttggcatttttaatttcttgaactgcccatgtggtttttccacacccaggtaatccaactgttagtgtaatagttggcattattactccttgttactcaatgaattctacatcttcgagtttgtgccatcctcttgaaaggtttcttgttccgttattgtattcagtgtatacaaagcattcaccatttactaaattaccaatagcagtacgcgatactttaacatcaagaattatagtactgaaccattctctgattgtatgatcccagcatttaactttacatccaatcaatgttttcttaaaatcgaaaacgtaatcttcgaccattgattcgacagattctattagttccttttcaatgtactttaacttttcgatcctctcaaatgcaagttctttattcatatgtcctcaattatctagaacatccactatcaaacaagcttcaataacgaaacaatcatctaattcaaagagtaattgatagtcatcagaaaacttcactttagtaatgtaagcactttcaattccaccactatgataagaactatataaaatacatttacctgtatattccttacggatacgactaaattcttcatataaatgagtaataaacgtatccgcagttttgttgtagtattttaggtcacttactgtgctcattaacttttcctactccaaatcgcttggagattttcacaagtacagattcatcacaacgaatactagctgtatcattggatgaactgtactttaatggggtccactgtaattgagattcttctaggaacttgatacatctgaagtaatctttcagagaaagaaatttaactactgacatatcctgaacaatactatgctgaacttcaactttcatatgaactccttatagtggatcaaatttattttcacgtttcgatgtatagcgagttacatcatgtattctcggcttaacaccttttggtttccttttcttcttgtattcagtactactacatccgaaggtattctcgattcgtttcttacttatcttcacacctttcattgagcgtttgtgctgtaattcatcgatttcttcttgtattttcctgaactcagtcggagaaagggaaccgtcatttttatacttaggtttagccatcacttctccttgtgcttaggctagatagtactaaaaatcctttagtacaattttcatgtattttataagagtctctttgtaatcaactttcttattgttatacattgcaaaggccaagccctgacgattcagttcattagttaaacactcctgaaccttcattgcgaattcctttcgctccaagtgcttgtgttccttgacgaagctttccacttcatcttgtaatgcattatagcacgaaaataccaattgttccattcttaatatcttttgcatagcatattcatcagtactgaacaattgttttaaatcatcacttgaaccatttaatactgcttcatataaatgagaatcaataataatactatcttttgtaagatgtaatgaactgtaccagtcagtctttattttacacattgtcccattatttaggatgcacacaaaaccctcaatatcaagcattttatgaacttcctccacgctttcacggaaggtatttcgtaccggaaaagtgtgatgaatatcttttccggtcatattagtactgtactgtgcaaggcatggaaacttatcacgtagtgctttaccacatagcaactcaccactcacacgatgtcgaacgttcagtacaaacagttgttctacctgatatggtaatacaattcggtactctggacttgtatactccatattaactgtgtaacctaaacgttccgcttcgtcgatgtactgatacaaattctggttctcgttaataagtcgagtactgttaatcgcatggtcagaatacaatgcagtatgtgatttacaacgaatctcaccatcattatcacgataagtactgatgatcgaaccatccaacttaggcataactaccgcaatgtcatcgcatgtggtgttagcagggaacattgtagcaggattctcgtaagcattgaagaactttttcattgtacgtgctgcacaacgtatcatgtcaccttcttcatcaatttcccacatagagccacgggtttccaacgcatttggttgcatgaaatcagtgtatgatgctagacgataactgaatacacgatacgtaccaccagcaggacttttatgatccacataaaaaaacgcatcgtttgtattacataagtgcattaaatcttcatatatttgtaaaagggtcattttattacctctatatctacatcagttccataatatgatattaatccatcatccgattcacactgaatagacaactcagattcatagtatgttactttattcactgttagtacttgttcttcaattactccagaaaaataattcatctcacgtacacgaactttagttcctttaggtagttcatctgatatttttcgaacaagttcaaaagcagcctgttcaatagtgtacagtaattgtaatctatcttggatattcatattatttccaccaactggtatcacgaccattagaaaaagattcattgtactgatgcctaaaattcgtttttggattattgttcatagtactaatgaaattaaatttaacattttcttgaatatattttataatactatctttgaatttaatagtactgaaatctaaatccaaatgttcatacaatacaggatgacaaaactcatgtgtacgcaatgatggcatagtatccttaatgtattgcacagtgttaatcattgcattgtactcaggcatagcacgcatcatcattagctgaaagtgttcttcctctgacattgactcatccaaatcaatagcgacttcatcatttttagagtcataaactttaatggtactcttggttggatcaagcatagcccactctggatacaggcatgttttccaaaaaggattattgcactgaaacatactaatgagattttgttctttatcaaaaatagcaaatccaagatccgaacttggttgaacttcacatacacaaatatcgtaagacgagtcttcagtactgagtgaaccaactacatttgatatatgtgaatatggagtttctcttgactccaactgaaatgtactttcaattcgattgatttgtggatgtaatgtaattacaccccttagtacatataaaattctatctaaatctttaatcaaaattctatccccgtatcggttaatttcgttccgtccatgtacttgacggttatttcaaggcgactctcagtactcaatttttgaagatcattgtagtacaatttaaattcttcaaagaactcaagtggtggaatatcgtataaagtactaatctggaagtgctcaggtaatccaaattccaatatatcaatcttaggcataagaccatcggctgctgcaccttctggagtactgctgtctgctacataaaacatagaattaccatgacgctggataacgaatatgcaatcatcttcacttacataaatcatatttccaaggtatggatcgttatcacaccaattatcatggacgagttgttcaacttgaagtaaatcttttataattccctgaccactatcgtcaactagaatatgtaaaccagaacaatctttgctcaaccagcggtatcttgcatcacatcctgattccataaatggatattttgaaaaatccatatcagtaccattataaaaccaatcgtaccactcgttacgcatagtaatcagcttagtacttaattctaatacattcattttagttttatcctcttaatttaatagtactggctggatattctaccaaagtattatctggtaatcctatacagtaataagggaaataccccatctttatattaataccaattaaaattcctgttttatatgaagtattaattccatagtaatcgtctatatcaacagcaagtccatataatgatatgttacaatccttgatatatcggtcaaacattttatacattgcagaatataaagttccattggattgtctcaccaaatctgccaacattttgatagtactgttaattaaatctatactgaacatctttgtacctgcgaaaaaagaccagcaaacgctggcctaaaaatttaaattatttcataaagacaatatacaccatcaacgccagcatcaggaaaatcaacatagaaattcacactaacagtgtcgtaatctatatcagtgattcgtccggttttacctacactttttacaaatatatcagtaccaagatacacgaactcaaattcgtccgcatactcttttatgatatctgcgaaccaacaaccacacctaggttctgtgttaataatttcaagatataatgtaatatattgttcgtatgtccatgtgtgtagataaaaatccatagcagtttccttagaaatataccatacccatcaattcagaatcggcggggcgagtataaccttgcttcttaactttaaaatagaatgattcatgctcttctaaattataacgttttttcaagcaacgagtgtatgtctgacaatttgggtgaacccattcataaatgtgaatgccattttcgtcataaccatttatactacaacgatttccttcatgcttcataaagtttttacttttttcagtaaattctttcactgtagttgtatatggagatttgtattcaaaaggaacttcagtcatacgaaaataatagtattcttcgtcttcatcatatcccaagagcactgtgttagtttcacgtacattgtaatgattcttactttttaattcattttcgtatatatctttcagtacttctgcaaaaacttcatcgcttgatgcattaggattagatacacctgatactcggcgttcaataataaaatcagtgaatttgcggtcttcggtaatatcttcgttcatataaagactaacaaacttatccttatatgtctttacactatattgcttactttgtacttcactataaacatctgctaacatattctcctgaccacactgcacaccacttacagaataagcacatgcatgttcagccattactgatgttaacatttggaaatttgccatgtttaattcattcgccatctctgtagcgaaacggatacggtcaagcatttcacacactccttgtgttaattattgttccttacccattattatatcatgaattagactattgtccctgtttatagcaataaagattctctaatttaaaatctactagatcacattcagaacgtactcgattcttgttccagaataaaatacgaatcctttcataatcacgataaacactaataatgcttctgtgtttagatttataatattcttttacaatatcaagatacattgacctaagtaacgattttactggataagacaaatcctgtgccgtagtaataaagtaaatcatcttcattgtttcagcaataagaacttcatttgttgtatttgtcattgtaatccttacatacactatgtaaagtaaatcctaaaccaacaccaacaattgggaatagtaaattaacataccatgtgttcattgttaaaaatgaataagcacctgaaactgtcagtactgccaatgaaaaaagactccagataaaaaatactgttctcataaaaatgttacctcatcaaatgaaaagtttaagtacgttgttgaatcttggtctaaactatgaatagtaatatgaccattgaaataaaaagaaacatcaactatttgaagttttgggtattttctagtactgaaataccttcctactactaagtcagaaaaaatatttctgtattcttgtgttacgtttttgtatagattatgtagagcactttcttgtgaatcgaaagtaatggaataatctttcaccaatatagcatatgttttctgcattaaaatgatattcataaatctcctaatatctcaaaaaatattgatattgggtatactgggttatcagatgaagtaacacatactattagtacgttttttccaggtgctacatcctttaccgtgaaattaatattattaagaatcagtgatttaccaatataatgctctttcaataattcaacaaaataatccagtactggattatctgcactatatgataactcagtacttgatatcattttatatgtatgaactattagttcagctttagtcatgaacacgctcacaattaaggcaataaatgcactcaatgtcaggtcgccatgatttatcaaaatctttgtgctgttcttcggtgtattctgcatcatcattaatagggaagaaatcaccagcaccagtcgcccagtctgaatctaaacggaaacgagctaattgagtactgttacaatatggacatttattcaaaatttattccttctaactgatatacgtttaatgaaaatgacccactattattatcgcatctgaaacacagtgttaaagaaccattaaaactaacaacatcagtacatatacatttttcaccattggatatgatagattttcctatatataaatctcttactatagtacggtaatgttgccataaaaaataatacacactttcatagtactcatcttttacatatgacaagtataagaatttataaaatacttgtatttcctttaagttgtttttcattctccaactccagtaaatttacaccaatccaatcaacatcactatcagtacttaattccaatcgtagcttaccgctatgactaacaatatcgcggaatttgtatattttattatcacgaactatacacaaatcatggtaatattcatgtaattcatccaaaaactttatccataccgaacgatagatttcaccgtagagatattctccagcatcaaccgtagcgtattggatatacaaaaatttgtatgtgaattgtatatcatttaataacatatgtaacctcttataaattcaccaacttcacaactttaatctcgataaatcccctatcggttatttcaagaaattcaacatggataatcccattgtatgatttaactccagagaactcgaatatatcatttccatcgataaaagtactgtaattcttttttatatattcacctactgaatctaagtactcaatatataaatcaataaatggttgttctttgtatgggttatgtgaacctattttgttactaacaaggtatacatcatacaaatcatataggatcttataagtgaattgtatatcatttaaatttaatcccaagggaatatctccaacggaatactggtaaatccaaaatcagtgtagtactgaacctcaactttaccatcacgtctaatgattatatcagaaaattctgcatggtcatcaccaataataacagtactgaatttttttaatcttaccacgaatcgtatgaatcatttcagtgcatgtgtcttctagactagggctatcattgtcgtgtgctaaatctcgaataatcttgtatgttagtaggaaatctttataattcataaatctgccaaatcaatagaatatatttcatttatattattattgaaatatgatagttttaatctaccaccataactattaacatgtagtaccttctgttttttaccatgaataactatttcagtgttaataaagtatgcacgtatcatctctaagtattcaatccatattttaaatgtgaatgagtcttctcgaactgtgttggtatttctgccattatgatgtaaatcaaacaaaacactgtatgtatattgtagaactttataattcatatatccccttacaaaaatagcccgaacttatgtcgggctatgtacattattcatcgtcgtcatcgtcatctagatcgatatagatactatcatcaccatcatcaaagtactccacaataactcctggaatattaagggcagtaaacattgcatcatatttctcatcagatggaatcaaaacaaattcatcaatgttttgaacttctggcattttatcttcggggatacccatatcaacaagtgactgaataatcttttctttgaattctaaaaacttctcttcagattcaaaatccataataagctgtgcaacatatccttcatcgttaccgaatgaaattgacatttgtgcatcagtaccgacatagcaccaaacacgtttacctgtgtgctgctcaataaagttttgaatctgtaacacaatgtcatggcgagaactgttagcaatgttgttaagattttctacaccagcattaattccagtactgtcatttgtttcttcaaattcaccataatcacccaatacatactgtacaccttcatgatgtaatgcatatgcatagtcaaggtcagcgagtgaatcgcactttccacggatcggacgtagggaaagacctaagcgaagataacggaagtatgtattagtatttgtatttgtcaacgtaatgctccttaacaatataaaagtagttgctgttattgtcaaaaaagataaccatccctttatagacatttacaccaattttgatttcacatatgttatttgatttactcgcttcagtcaataacattttgtgctctttactgaaagtgtggaacagtggtttgacatgccacatttcgataccatccagtactgaaaatttttcactaaatttaatcattgattcttgtaaaaaatatcctgtaagatttatttcatcacacatgcaagtttccaagaaaattaatcacatctgcatgtgataatgtatcattaccttctagtacattaatgataaacggcacttggcgatatagttcagccaggaattgtacctcatcagatgtgtaagaatatcccataggaacaacctgtgcagtccagtttcctagagttttgttagcaataattgcaactacagtattacctttgtattcaacatggatggaacgaaatcctgattgctcattttgatcccaaagtactggattggttttgaacagtactgacataattatttcctcatgtattttataacgtcttcaaataattgtatttttaagtcctcgtcatttccaggtaaaaactcacgaaaactatcaaaatcttcattttttgcgaagttacgcatttgtgttgagctatattgacttacattacggtcaatacctgcctgaattgcttttatactacaaaaattatacaacttaccattgtacatgtcaagagttttttgaaaagaatcaatacggtcagaaccacaaatgaaaagaacatctaagtactttccatccagttctctcattatatcaaatagattgtcttctgtgtagatgttctcttgcactgaaggatagaatccctctgtataatacatttttagttcaggtgggagtgggttttttatattgtcagtactggtgcttagatatatttttaaatcagcattgtactgttcttgtagtgcttgagctttttcaaacactaaaccatgtccgtgatgtattgggttacatctcataaatgataatatacatgtttccttcatcgaagatactcccttacaattttcacaacttcatccagcttatcaattgccacagtttctgtatacccatctccatattcttcttttgtgaaaaaagtatgataacccatacttttaatatacttttcaatttcattagtgtatccaatgtattcatgtagatataactcatattttcgtttagacgtattttcaatgtcatattttctacgagtaatatctttagagactcctattttgaaatggtcatctgatttcaatatataaaaatacagtttattgtcagatttaacatcatgcttcaaatgataacttgaacatttaggacaaccataaccatgaactttaaaattattataacttgtagtattccatataccatgtgttgggcattctaatgataatattgaatctttaccagcaaacttatgtataccatgaaagatatacatattacgttctgaatcatttgtgataattgttttcacactttcgcaaattgatttatttgtatggtttttacatccaacacatgttggacaaccaacagtttggtgcgtaaagttaccaattgtgcattgccatgtcccatgttcagaacattccatttcacaataagttccgtgtcccttccattcaccaacaaagccattaaatttaatatttgatagcttaggtgcttttagtttatcatttattctactagcataaacacgtgggtgtagagcatttggtggttttcctatcatagaaactgtgttgatatcaatgtattttgtcatatattcttcatcacctgaccaatagatttaagatagttgattttagctggagtcaaatacttatccagtactattaaacaactagggaatggagcactgtcagtctttttatctggttcttcagggataccgaactttaagcgaccttttataaaacaaatacaatcacaaactttcgcagcataatcctgaaaggctatagtatcagttcttgatggtacgagaatcagtactgtagcacctttgttatatgcatcaactgccttagataaccacgttttcaaatcactgtacggtgggttgagccacacgatattgtttccccagtcctgttcaagtgaattgtcttctggtgtaaagaacttatcacacaatgcagtttctttgacacacgctgcatctagtgtaaattcccagagttcatccaaatcttcaaagaaatcctttggagtagtccagttatcttttccagtactgaaatgtactgaatgttttttcgaagcatccttcttcgacattatataattccttttgttagagacagttgtgtactatcttatcaaaagtactactgtcaatgttatattcatataaaaatttaaaatgtgaaccgtaacgcatcatcagattaaactcttcttcagtattgaacttgtaatcatgaatagtctcaggggtacattttaaacccaagaactctataatttcagatgttacatcatatcctgaattgaagtatttaacccaaacacattttccttgtgggttgtattttctatattctccttctagttctcctttaataatatgagccttaacacttattgaattattactatatctttcttcaaaataattaccatactgggcttttgatattgttggtttttgagtaggaagtaatttaactgaagtcacttcaattccattttgtaattcctttatataagaaatgcatcctttttctttaataaccacatatccagtaaagatatcttcgtcttgtgattgattaatgcaatcatcaaaattcaaagttttataagtaacagttttttcttttctaataaatgccatcattattcctatggaaacatcaatgaatatacgtgacgttgattgcatcaacatcagtagaattatcatgctacgcatgtctaattctacaagtactattttcttttaattaatattgacggggtttgcttgagcatatttcatccccccgcaggggaaagaacaaaaaaatttgacgctggtggccttcacatagttcatatcacgaattctcttacgagacgaaagcgggttgctctgtttctctctatcgcggttcttgtagcaacggtcgtcggtcttaaacatcccgacacataatacaaataccatatgaccagtacttgtatttgatttcacaaaatttggacgcaactatattgtataattccgaccgcatatttcttatgaaatctcccttagataattggtaaggtgcgatccttatatgtctatcgaggaactctctttatcctattggagttctttatacagccgcattgccgtgagtggttcaaactatgccatcatctaacgggtttcatctgctgttcgtactgaaaggactactcatctaccctctacattttcgagtggattaggcttttaatcatttccttatgggaacctttcaggattaaaaaaaggtgactaacatattatgttgtcaccttatattatatcattaacttatcatttgtctcagttatattcggttttttctgtgaaatttgttagtatatcaacactaaaacttcgaataacctcaatcctgcttggcatgaaacgatgtttatttttaatatacaactcatcatcttcaataaaagacgtaaaaataaatgtcatatcttcacgtggaatttgtaaaatatcacacatttcatttgccgatgctactggtgaatcgttgtagtactgagagtatgcactagattggcgaccgattataatagaatttctgattagaaaattactacagtactgaaaatctttgtagtacttttcaataatgtacggcataagtgcttctttcacgtcttcataaccattagtactatcaattgctatacagtaatcttcacgttcttttttctcatgatggtaatcataaacatactcaaagaatgaatttttatttaatgaatcatttaaaccaactgacccactatagtatgattttctatcattcattcgatcatctgggcatgatgcatacatagaagtgtcatgtgatgatgtaccaatataaattttcttagtaatatgattatacgctatgtaatcataatcttgaactccagtcagcattaactggaacattaaatcatcaggaacatcaattaacgggtactcaaacttcgaatatctactgcggcagaagttcttttcaaatgctcggtatgcgataaaatcttttagatttttacaagattcatgctcatgagcactactgctacgtacattgacattagtcgatgtgcaatatccatccgaatcttcggtgaagttaccagcataatccttattgtagtcaacgattagataaagtttcatacatctccagacaaaaaaaggacgagataacaaatcccgtcctttggtttattagtgacttgcccagcagtaaacaggacgtagattttccattggatttacttcaggcttcagtactgttacacgtacttcatatggagttccatctgcgtgatggaatgtttcataatgaatactttcaataaatgtttcgtattcttcttgtgaacgtgaacgtactgatgatgaatatttctttttagaatctgctttaagtgtaacactaactagttctgattcctcaccttcttcaagtttgttgaaatcgaactctggtacaccttcaaacatatcaaatttcattccattgtcttccatttttaaattccttttatataatgttaattagatatttttaataagcagattagattgtgtcatactgtagtgttccgtgacggaatttttcaagtcgtgctagaacttcttttcgttcaacaatttctggaacatcttcttgtagttgatcacaaacttcaacaatgaagtcccaatcactctcacaactttgtcgtaccgcctcaattgttttccaatcagtactgatatcaccatcagcattttgatatacaggccaaacttttccataatcagcaatggatttgtcatttagaatacgaatggcattgaaaatctgaccagtactgaagtgttttgtattcttcatatcttctaaacagcatagctttggctcaccttttacttcaatgagtaaaacaccaccaattgcttttaggactgaacttgtattcatctatatctccgttatcaaaaaaagatgtgaacattatatcacaagaatctaatatgttcacattattttcattagattttaataatattgtaccagttatcaaaatcctcaattgctagaatgaacatattttcatcattgaaatctaaaatatgttcattgtataggtaactaatgtacttgtttttgcatagtctagcattcattagtaacatttctactgcacgttcataagaacaaggaacaaggtataacttagtaccatcttggtgaataatttcctcagcaccatgtggtataaaacgttctgctgtatgtggaatatacggcttagttttaaaaataattttgaatttagtatccataccaaatcctccagatttataatgtttcttttatgttatgtaacatagtattaactatgcacatcttaccacctaacttgtagtaatattctaacttattaataatattactttttaatatatcaaatatttgatattcatttggatcgaaactaagttcgaattggaatgtatataaattgttaaagaggtgaactaatgatgcatctggtgattccattgtaactgtatatttttcacgataaccagtactaatcactacttcggatatatcacctttcatgtatatgtcaatattgtacatcattggtctgcctgtggcaatatctttcatgcgaaagaatgcagtactacgatatacaatgccttctgaaacctgttcttgtatagtgatatttgaaacttcactctcttggaatttggactcgaatgaatgagtgtaatttgttttttcattatccgtgtgcatagtacatgtgtattttccaaaatcatctctagatgtatatgatttatcactgctagttttatagaacgaaacaccattaatatgttgttctttatacatcatcgtgtcatgggatttgtagtatgaacaattaggtgttgaaagagattcaaacttgttcacgtcatgacagtaagaaatagaagaatcgctatacattactacatcacgaattgcaacttcttttgtaaaaccttttttgacggaaatttgaaagtcattgtatgggaagattgtatatccatcgtatgcatctgatgtactgataccaaatggtgtagtagaattcagaaattcgttgatatgttcaagtactgaatattttttaaaattaagaaaatctgaaatgtctaacatatacaatcctcataaatttagacaaaaaattagtcgagaataaatctcgacttgtgttttactttaccatttttcatttcttttttacgatccacatgtgtctgaggcttgttaaactcattcatgtgtttctgtacgaaattgtttactttcttagccatacttactccaaactgggatctttaactgttagactttctatgtcactcgcataaagaactacattggattgattttcagacactttaaagtcgtgataactgtctttgacgataaaattatctaatataaaccctttactacagcacatcataattttatcatctttgattgtgtaggtgtttttctttttacgtacttcagattgtggcgtaatactatcgttattacgaataacacaatcaatatattgttcatttgtactcataggcatacccatgataaacgagttttcagtactgattgttagtataaaaacgttagtatttgggttgtgaaaaaaatcatgcattgtcttgctacacaaaaatagacattgaataatgtccttcacattaaacattatatcatgaactttgaatgcgtccaactctaaaatgtcatcaattttcccattttcaacagttttaatctccatgatctatccttgatcttctaatgcactccatgtgcgtttttattaagtcactgcattatacttctctatagcattagtaatatttaatatagcttcaggaaccatttctttattgtattcacgttttaaattttccattttcttaataatttccaagaaaaatggcaaaatgcatgaagtatctgtgaaattacatgagtacaaagtactcatttgaaataattcacctgaatcaatattaagagatttgtattccttaacaatgttttcgtttgtattgaaaatatgaaatactgttcccatgtgatgaagatatacaccattctcattttgaatatggcatggtgtgattacaatagcagtgttgtcaatattatttactattgataatcgtagactatgtaaacctaaaataacagtacaatcacttgaactgctttgaatttggtcagcagtttgtgtaacacttgtaatattttccccatcaagacaactcttgattttatcaaatgaatttttcattgatttagttagatacatttatgaacaccttcgaaatatttgattaatgattttatcatatcgctactaatgccatgtaagtcaacacctaaacactcgtattgaaaaaaatcaatatcctccagtgtgtttagatcaatttccaccttatcatgacccaacgaattcataataacgtttttatcattaattgtcaagaaagtttttttatctgaacctaaaaagatttttacatgtttttttggcattacatcataagataaagattgtgaaccataaatgtatatgccttccattgaaccaatatctataaaatatagacgaatccctttgtggtattttgactccttagtgatcgcctctattagttcatctgtggttgttaaccttgtttctttcttctctaaattgctcaaatgcataaaataataccttgatcatttgtaatgtttctgacattacatcagcagaaaattgaacatcagtgtattttaccatagtactttgagtaaagaaagtagcttcaatatcttcaaggtcaaatggctcatcaaataaattagtactgaacatatcagtttttttcttataagtcaacataaacttagcactgtatctcaatacaatttcatctttacttactaaaattcgtgcaatgttctgtctacccagtgttgtaatgttaacattaaacgtattctttcgtgcctcaacaatatcaacgaaataaccatcaccttggtaaacgttatgacgaacttctaatccatgttgaactgtattgaacagtgcgtcctggataaaataatttgcagtatcgatgtttcctaaaatatctaacataacttctcctttatagctgtcatatttagaagaaattcagtaagcaattcctccgtaacatgctctgtataccagaatatcacaatatcttttgaaagtcgtgtattcataaaaatatctactaactctttgtagaactctagtgtttcgagatttgttagaattaacgagtactgaaagagtaattcttcagttagattaaattctggataaagtaaatcattgaactcatgtgatgcagtttgaactttaatttctttgaagttattggttatacaaccggaataaatatttcggtgcaactctctgtacaacgcagcataatctatgaattttgctttagggttaaaatcaagaacactttcacctttatatgacaatcggtggaacgccgagaacatagtcacttcccacggttgcttaatatctagctcagtaatatcaatattattggacagaagaaccgtaaaaatctcaccaatctttaatagtaacttagtacgtgccagtgctaccatcgggtcagtcattatacaccttcatattcatcaagaaaatcttcgataatcatttcagcttcatccatatgcatagcatcaacttcaatgatgcgaactttagatgcatcccaaatcatataactaggaacattatcaggctcgtagtcatttttgtactgaacagcatcataaccttgagcagtgcaattctcaataagtgaacgccactcatcatcactgcctaaatcttcacacagaagcacgttatcaacatcaacttctaaggtatgcaagtatactgtacatgcgtctactacgttcagtgggcttctcagcttgcgtaatgcagcttccaaagcactgtgtttacctcccatatgaagaccaccatacgggatataaaagttatcaatttttacagtactcgcatgatacagtttcatatttcattcctatttcagtactttagtcaatgctttcacagcggtttcgagttgagcatagtcgttaattgtaaggtaatgaataccatgtgccttcatttcagcatctattttactatataaatcaaacatgtcaaggatatgattgtatgcatatgaagtatttgaaacacacaattcttggaacaaacgttcttccaagtcattaacaacttctccatgaatgtcaagtactacaccatctttgtaagtgtagtactcttcactccactcttcagaaagtcggaacagtaacggattcccgccgaacacttccatgtcataggaatttatctcactaagtagtgtttcacctggttctggtgtgaagtcaaaatatgcgagtgttgtaccatcatagtccttgagtgatataccagtatgatttaaggttacttcaccataattattattcttgaacttgattttgatattaatctcaatgtattttattgtctcatcatcactgaaattgtaatcaactttatactttttccaaagaagtttgatatctttgaagtactttaatttactttcaatttctttaaagtccatctggaaccaccatttcttgaatgtgcttacattttatatttgccatattggtatgtaatataatgctgtgtttacgcaatgattttactttgtagcactcattgagtactgaaataattccccataactcttctacactaatagtgataggttcacttgtactcagttgcatcagtgctgcttgaacatcatctttgttattaatagtgaactggattcctcttttgagaattttagtttttggattgtactcagctaatacatcaccttctggataaccctcatgaagtaataatgttgtttcaaaatcaccgcagttgaagttaatttcatcataatcaggtacacaaatgttcccttccccgtactcattaggttcagattctagtgttaaaatacgctgagtctcattgctcaggatgatagaatcattccagtactgggtagtgaatgctctacgtttcttttgaaagcacatactcgacattgaaccatacttcttgtatatggacttcttgaactcaatagcagcaggagccaccttgataacttcacgaattaagtcaatagcttcttgataactttttctcatttatcgtatccatataaaatatgatctagtgtactttgtacttcttcatgaaagaatgaagggtaaacttgtatcaatttatctttaagttcaagggaatggcatagttctaatgttttgtaacaatcctcgtactgtgccagatcatgtaatgtacttaactgaaaatgttgttcttcggagtacaataaatcataaaccatattatcggataaaagattagatttgattgaaggatcaagtactgtctggtggtgaccaacccaaaagatagcttttgagttaatgttattacaaccccatcctttccccatcttttggtgaatagcaaatacacaggaatcatacaaattaatgctcagacgttcttcgtctgcatggatagttacaccatcaatagatagtgtatatttgaaatccatagccccctcacttcgtgcacgagaactaaagaccagatatcgatgaattatggtattgattttatctgtccatccatcaacacatttggatgcacataatgtaaaaagatcatgattgtagttcataaaattctcctttaggacaatgtatcatacaaaaataccagagtcaacccctggtacgaatttaatccatcataagtgggataattgcccatatctttttcataatcatatcttcagtaaaaacaaatgttttaggagcagtatatgatattgacacaccaaaaggaagtttgattgcatcatcaattatattatgaatatcaaaccatgttttaacataatcatacggtggaagttcatgaattgtacttaactgaaagtaattctcttcaccaaaatcactatattcaatttcacaaattttagtgaattgatgattccatttagatataatactatttttattattgtacatagtagttctatgcataaaaccatttttgctagtatgatttgatattacgttttcttcaatgtcagtatctattttaaaattcatatcaaagttgtagtacggacttgacgattctttgaattttaaatgtaaatcgcgattgttattaatttcaatttcaatacaaaacacatctgaatcaaaacgattaaacttgtaatcgttatcttccggtagattctgtatttttttcataatactaagcatagggtgtactacacttttaataaaatcatttgttattttcatagtattcctttagaactttatatgattcaacaatactatcttgtgtataatttgaactatatacaacagcacttgttttagttgaccatagatatgacataaaggttataacactactacatggacttaatgtattgttttgaaattcaatttcttcaatgttatcagtactggtatagatgaattggaaagtacccattgatttattggacagcgatactatagtagaatccgtaccaggactatacatgaatgtctcattactaattgaactatcattagtatatgatggtttgggaatataaatcaaacgcatgatatcgcgttcaagacctgacttattactttccaccaaagaaatcatatctatatttgatatatgttcaacactgacatggaactttttgtcgagaatcacatctccatgagaatttttatatgaagacaaaatctcatacatctcaactaattcgcgtgcatttaataaactcatgttttgtctcttaatgaaagaatatccttagtataaactgaaacagaaatatgattatatttcatcattaatttatacacataagaagctagtactaaatcgtaaattaatttagtattatacagtacttggtattgtaacgcaagtgaatcaatatcatctttactttcaatatccagaaatgtaccgaaaaatgtagtaccgtagagatgaaaagtggaattaatgcaatcaatgcattcattgtccaatagagtagatgctgatgccctcggtgaatcccaaatagtcactgcgtgtatgccctcaacgaacaaatctatccatattttgtgtcgttgtctttttttgttttataattttctggatttgaaagtgtagtttcaattatatcccatatgtacaaacaatcatctcttgtcattgtagcaccttatccattgctgcatttaatgcttttaaacgatctacattcaaattattgaagatgtacgttcctaacatgtggaaatcgaactggttctttttgtattcatgataaattaaactacaaaaaataatagtactaagaacctcttcaggtataacagtgctcatctggaacagttcttcttcaactgtacttgaatctggattgatagcttttaacacatactcttcatcaccgaatagtactttaatattatataaaacaccaatagtactaatatggaatgggtgatgtgaaaaacttccatcatccttaatttgtatatcggttctaatctcacactcttcattacttttacttttattttttacaatacaaatatttctggccccagaaatagtaagaataccgtggtcgtaatattcatttgaccaacatttggatgaaattgatacatcacggatgagatattgtttttcaatttctttcgcactaccaacaattgatagcatttttttactgatatcatataataactgatggcgttctgtcatataactataagcgttcatatttttccttaacagattctatattttgaagtagtgtattcagaacatcagtcttgcaattgataaaatcattgtacataactagttcaccacaatcaagaatttttgcagtatcgtaacaaagcattaagtactcgaattctttgtaattgtccaacaatgatttctggaaaatgaatgcatctcgaatatcttcactttggtctaattctggtggaacatccaacccaataaaaccatcatcttcactgaaatcagattctacaattttattcattttttcatgtaatgcattcgcaaataccatattagaagaaatagaaccaatacgttcacgatttctggatgtgcgaatgtacatagtaatcgtatcccatgaacttttaatttttttagaaaattcataagttttatatacatccaactgaactgaaccaaaacgatgtttggatttgttttcaattttcagtcgataattatcaaattcaacaatttccgtaatgtcatgaatctctgaaagttctgcaatgtcatgcatgagtctcaaaattttagttctgatatggttcattgtgcatcctcgaatttaacaggtacatgttcattaatgaaattcttaagagcctgtactaaatcctctaattcttttgtactgtattttaaaatagttttaaagtgaatcaaatcttttctttccatgatctttggaattttatatgctaactctaaacagcgtacagtactggcatcatacaaaaggtttgcgttgaacattagaacattgtattcatcagatgaaattttataattatatgtatcaatcacttcatgtgtgtataaattcttatacacaattttattctcactgaagtttgagcaaacacacagatgatcgttgtaaaatgaagaacgataatcttgtttacgttgtacatctgctatgatttgtaatactgtatatttttcttcagaatccaactcaatgttagcataactgctcgcagtttcagatacaaggatattgatgttatatttctcattaactttaatgtactggcgtgagccagtatcaggaatgaacttaaaacaatgcttcagaagtaatgtgacttctttaattaattcagtactcatagattcctccaactctatttaaaatcaagtataacacacctgaatgctcttgtaaagccataaacacaaaaagacccataagggtctttattttggtaaaacgctgtcaatgtacgctagaacctcatctcgaaggtacgttccatctatagttaggtaatagttcatgggaatatcactcccaaccttctcataaattttcatacatgatatcacatcttcatcacaaatggtactcaattgaaaaagaacttcatcggttaacggtacgatatcatgtttagataggggatttgtattttcattcaacacaatattaatcaagttaggagtattctttgacgaaatataacgatgcttactacgaattaccattctcgatagtgaaatactggaactccatcttggatcaacatcttcatatgataacgatattaacatctcgtgaaaatcttgaaatttcattgacgcataatatgttttatcctcaccgtacataccaaatgatttgtattcaatatcccctactttgtatgtatcgacatcattatttgagaactttattaaactattaattagtctaattagaatatcatctttatccattcttaaataactccaagtgcatgtcgtataaatctatgaagtcttcatagaaatctttttcttccagaatatcctttaaactgggaatctcttccataatttcatctatatctgattctataaaaaaacctgatggtttattgtagttttgtaacagataactgaaagtaataatgtaaagaagttcattaggattgtgaattaaacttagctggaacatagctgattctaaatctgattcagtactaagatcaacccaacgtgaatttctataatcaattcgtacttgacttgtatttggattccatgtgaagcaatgtgtaccaatatgacctatacaaccaacccttgtactgtctccggtatcaacactgatatcaacaaatagttcaataccgatatcggttgatgttacacgaccttttttcagaaataaatcattatccttacgaaattgtttggatgaaagagtgtcaatgatgcacatcaatgtttttgcaaatgcaacacaatgacgaaattcaagcctatgaaattggtaatcattgatattcataattcaaccctcaatattttatcagcaatagatataaccttatcattgaatacattaccaatctcaatccttatatacatagcaggtggaatctttccttgtagtgaataatatgtttgtatacctaagtactcattatctgataatgaaaatttgattctctccatatcaatgtctgttactggtaaatctatcatttcataatggtagtcaacgttttcagtgtatattttatcgaagtaatttgaataatcactactaatgtagatgctatcatcacgaataattactttataatcagaaggttcaaatttatctttacaggaaaagaatgcatcatctattttctcttctcttatgccaaataacattctaccatcatattttacatcaagaatactacctagtatattaatggtacaatgctcatcaatattatgatgtaatgaacgttttttgtattttgggttaatgaaaattttcattaattttatacaaatttcagtaatgcattttacattctcattttctatgtacattaaaatccctctttaattcttttacatttttaatgaatactttcattgcagaaatctcaaaagataatgtattaaatttgcagtactttttaaagtacgacataatatataacattttgagttctttttctgtataaattaaactgttttgaaagtaactttcttcggaaatgtccgtaagaaaagaataaaatgtattttgcttgtgcacaattttaatactatcagaccaagatttgtatgaaacgtaatcagtacgtgcaaaatcatatagtgaattagatgtatctgtgtatgtttccgagaacacaatcttatatatcttatcttgaattcgagaacatatgtacctatggtcatctgtctcactgattgcaatgtatctatggagtaaatctttatgagcattgatgaactcaaacacttctaaacactccctagcaaacttcatagtttctctgtactttcggttcatcaatctctccaatctttaccagggaagtgtttctcgtagtactcatcatcacttaacatataatcaggagtttctacttctattgttttgaagaatgtttctggaaggtgtgtaactttattgggttgtactttatgttcgcgtaaaaccttctgtatcgctcctagacgttgtaaatcgatacatgtaggcagaactaagctgtattgaaatatctcttcaggagtcatcatagacacatctttagcttgtttgatttgaactttagtactaatgaatatatcaaatccttgtacagcattatagcttacataggttgttttatttttgtcaataggagcacttaaacgatatccatatatcccgtgtttgtcaacaacacatcgttgtataattttaatcatttcgaacataatttacctcgtgtgtgatataactccatgcagtaagaatatctatttgtatatcctgtacttcatgaaaatgtttaagtaccttctggtattccattatttcgtacacatcttcagtactgatagtgctctgctgaaacaattcctcttctgataaagtactataatcagggatttttatttctgaatatatatcatttatctttccattatattgataaatctggatataaaattgattgtattctggaatataggttacataatggttgtggttgattacatatcttgaaacaaagtattcagtaccatcagtcatgtactgaattgttgtcgtattttgcattcaaataatccacgcatttatagtatactactaaatctaaaaagaatcgttgtttgtatttgtaatgatgaagtagtgcaccataaaataacatagcattaagtacttttacatcatgaatacaagaaccctgaaagtacatttcctctgacatgagcactaaatcatcatacttaacaaatactgcttctctataattgtcaatattaatcttcaaatcagacccagggcaatatgaaatgtattcggctttgtaatgaaagtcattgtcatcaaagtactcggcatagatttgattacctcttacattagtaaacgcaagtcttcctttggatgaactaaactcatcgtattcgaacataccaccaaatgggtcaggacttctgaactcctttgcaatgcgatagatattttctgcaaattctaaaacaccatcgtaatcatattctgtagtaatcataaatcatttttctccaggtactcaataatacaatcgagattgttcaggtccaagtagaaatgatcactatctgaatttagttcatttttaagggcagtgtaaatcactgaactgaaaacaatcctctctggatacacagtactgtactggaagaactcttcttcagtgttaatttcagccgtatcaaatccttcatttataagatgatgattgtagtatttgaaattatctgaacttgggaaatggtatgaaataaaatcaccacttggtacttcatcaagcactctaatactacaagttgattcatctgaactatagagtaacccatccataaaggaaaggtatccatttcgttttttgactgtatgtttgcctacggaaaaatcttcagtaacatttgtaagaaatttataaaccctgataatgtcttttgctattttttgtgcattgctaaatgataggtctttggacattgtgatataaccctttacaattaatataaagagattatatcacaaagaatcggagggtgtcaagatgggttgcgaagttctaccatttctttccaaactaattggtaatcttctaagtccagatagaagtcttcattccagtgctcatgaaagtacttatacatgaatagaactcctaaatcgtatgcaggaaacaataatgatagttgaaagtagtattcctgatttaaaactatatcaataaactctaatgtacgtatgccacctttcgatgaacgtatctcaatgtgtgaggtatccttcatactgtaacacatgaaaccacctctaaattctggatcatattcacattcgaactgctcactgttgttatagaaatctctcccactttcttgatctttcggtctacgtactgatacatgaatatttttatcacggtacattgaacgatttagtattttcaaacatttgaacttatcttctttaatgaacttgataatatcaattatatcttgtgctgtactgatagctgattcgaatgtatccaacttaagatgattatattgggttccagagttcatttttttatctaacatacaaacctcataattcatacatttttgatttgaactgcatatgaccacctatttcacatggataacaattcataattttgttcaatagaatctggtattttttaataacttctatatcaatttttatattactattaaaaactaatgattcttgaaataattccccctcgtcaagtgaagtaaaatcatttatcttcaagggtatattgttgcatcgcaaggagaatgtattttcatcacgaattaaagtatagaaatcattatgttttttattataatcaaatttaacaagtagtagtttaatatgagtagcgtacattactttaactaattcagtttcacgtcgcatacaatacctctcttatgatgcaaacattcttgcataatgtgttgtatttttcgtaacagaaacacatccagttcattaaaaacagtactgtactggaacatctcttcttccccgtactcagttaaatcatcaatttcatctctagaaacagctacaatattaaaaccacgtgtactacaataacccttagtaagataatatatgtacttgtactctccgttgatatctaagagatcttgtgtgatacagaagcttttgggtgacagtttatcatcaggaaccatatgccttgcttgtacatagcaacggataccatcacctatactatatgtaataacttcaaattcaatcttcataggtgaatataatccttttatattgctcaggtgcagtactgaaacgtttgattggataattatcaaagattcttttcatttctttctggattaaacataagaaatcaaagttacaatcgtacttattatcccatactaaactttcttggaataactcatcctcttgcattagtgtagtgtcaattacatcttcacggacatagctatatacttcatagctcttgaagccatcttctgataattctaattcatatgcagccatatcaaacatatcatcatggtttgtcttcaaagatattaaacaagtaactaattttttagttgtatagtatgtaatacttaatgtgttcaattgttttatacctcagtatatagcttacaatagctttcatcgaaattacaaacacttctcaagtactgacacaggtcattgaaaatatttacatttgatatatatacattatcaaattctgttcgttgaaagaatgtatacatagaatttgtaatatatcgcattgcatcttcacgtcccatagttatatcatttgtgaacattgcatcttcatcagtactgatgtgttctattttaaatgatttcataaatggaatactctttcctagggcataaccatcaccatatgatgcttctactgcacctttagaataaaggaattgatataagtccgaatcacgattataaaaagtacgacatacggaggaacataatttattatctatatgaaataaaaatcttttagcatttttatctaatactattcgcaatgcatcactctctagaaatatatcaccatcaagcataaatgagaactgtactaatgctttttctaaatccgctcgtttgtgataaatcatttcctgcatatatataatatcatttgctaatttcttaaaaaacaaatgcacatctgcactacaacatttatttgcatttattgacataatagttccttatacatatgatgtactttacaaatctcattatagtatttcatatcaatatcatttgtattaaaaacggaaacagacaataccgctaaatcatcaatgaagtaattattatcggcgtactcttttaacttattgaacatatagatgcattttatacttaattcatcatgcaacacactgttctgaaaaatattctcttcagtattaggagataagtaatcttcaattatatacgataaactactatcgcaatctttatagattgaaattgatggatgtaatgtgtcatacattacactaaacagatcaccgtcatatgtggatattaaactattattggaaacagtaggatgataatatttcagtactgaaaactttgaacaatcagtgcagtaaaaatgatccatccctcgacgactttcgtatgagaatagtttacttgtatattcaatccctttggtgcgacggattgtttcatgcatttctgcacattgcattaaaattaccatacgttcaaacgcaagatctaaatcatcgtacataacggatatccttcttcaacgaattaatatattccaaaataacttgttcctgatattgggttcccaagtacatcagtactttcaactctttgaattcagtactatatgagtctgtttgcatcattctagtagaatatatattgaatagtttagcaatatcatcttggtctattattttcattaaccctcttctgtattagttcctgtaagtgctgaatataacccttcattgcaacatcctgtttgttagagccaacgaagaacaagagcttaaagtcatggtaatccatttttggtttagtagtgaaccatatgtcccacactgcactcacagttctcatgtattcaattcgattaaatgtttttgaatacttcatcgatgttcattgccaacaagttaatatataaattactgttaaatgctatctgcaattccatatagaactgaatgattgcatagtcagggtcagtacacgatagttgaaaacactgttcgtcaaatgcattgtaattgtacttagggatgtgaatttcacgcttcaaatcaggttgcccccacttcatcgcgtacacaccaatgttattgttctttttccttttcttaaatgttaattgttgaatatttcctgcgttatccaggaaaatagaattattcgacacaggtgcaccaatagaaaacaatgatgtatcaattacgtgtttctcacgtacatcacacttctgaaatgcacctgtaccctgtaatacacgatgaaaattgtacttctcattaacaacagtactaggatcaattaaaccagtactgcattttttgagtactggtacgattatgcgaatcttttttgataaatcttgtaatgcatcataatcattaatgttaatttttctcaaaaggatgcctcttctatagtaacgaaatcaactaacctatcaagtttttcagtgtctagataaaatacatctagtactgatttctgatatagtacactaaatgtacatagattgtcaagtgttccttctgcataaacagtactaccctggaagtaaccttcttcagtactgagggataaaatatctgaaattttaaaagattctacagtttcatgtctctcaatattaacttcatcacatttgcggttcaatgaaatgtaatcgtatgctaactcaattagactccaattatctccattagtgtcaaataaagaatcaattgtaatattcgtgccattagaaacttctcttcgttcatcatctacgtattcaggattttctttgaagaacttaacaacttttagaatatcatttgctttcttgattgcactttcgtaactcataataattcaaccactccatctctaaagtacatataactaccaccattggatactgtgaattctattgtgcccaataatatattatatttttttatttcacatgtagtactggtagtgaaaggctcaccatctcctaagtacattgacatatgacatagaacttttctacctgcatatttctcttcaaacgattgttcaaaactatgcataatatgatttaacgctgaaatgtaattaataaagtcaggtatttctgtcaatgaattataaaccgtacaaagtgaatcaaattcattttttgtcattatgtttcaatctcaatgtaatcctgtgtaattaagtaatcccaataatacttcacctgcttttgtaattcaattaacgtaaagaagttgatcgatttatcccatactagtgattcctgaaaaataaatgattcatgttcatcttgataatcacactctaggaaatcaggaatgtattcactatcgtgaatgtattcaacaaacgaactagcttggcatttcttcactactagtaataatgaattatcatggtcaaatagatacaataaaccaatttcaccagggacgtactgaacactgaataagtttttcattctataccttctggatctttacgaagatcttcgaaatccaaataaaatcgaggacagctaacactcttgaagtaccacataataactaatgcttcaagtacttcatcatcatatacagtactgttttggaagtaatactcttcactatcccactgaccatgcagtacttcataattcaaaattaatggtttttgtctattaataaaacgaatgctaccattttcaacataactaataaattctgcatctctattgtattcagaaaacgatataggactattggaattcaacccaagaataacccttacaccaacggagttattatacatttcatctttgtagtagttaccgttctcggctttgtacacttctttgaactttccggcctttatatcttcaaagtatccatgtagttcttttgctttttcaagagcactttgtaatgacattaccttctcctactgtattctctacatattcataatcaaaatagaaactactggagtcaatacttttgaaataccacataatcacaataacatccagttcttcttcattgtagatagtactattctggaagtaatattcttcactatcccactgaccttccagaactgaataaggaatgatagtgtcatcagcatcactatctgtgttgtagatggtaatatcttcattacggcaataactaatgtactgattgtacatatgatattcacagttatcactgtcaccagtatcagtgtgcagtactaatgtttctgcacatacctctgaatcgtcataatcatctctatccttaacgaagaattccgtatctgatgttttgtatacacctggtactgaaccttcctgtaccataatcatgtactcatgaatcttctttgcttctttcaacgcactttgtaatgacattattattcccctgaaattaaatactcacatgatccccagtcaagaaagaatggttcaaaattcaattccttaaagtaccacaacacaaccaaggaatcaagcatttcttggttaaaaatgagactctgttggaagtaatactcttcagtaccccacgggccatcaagcactccgaagtcaacaggtgtatttgatgtgtcaaaagtaatcttagtaccaggaatatataccataaaactagtatattgactacatgaagagtactgtatattattgtctttatcatgacccataagtaaaatatcattagagtatctctttactccagtgaggtaatattcattcccatatgcatgtactttatcagcatagaacccactttttattttatcatggtactgatgtattttgttggctagttctagtgctttttctaaactcatatatcctctttaagtactcttagtagatccaagtctatgtagaagctactataatccgtgttatgaaagtaccaagaaataacaagtttgtcaagtatatcttcattatatatagtactctgctggaaatagtaatcttcactaccccagttattatccagtactgaatacggaagatgtttctcttcaccaccagttagaatgtcagaatcttgtattaaaatatcagcatcacgacagaagtacatgtaattatcttccaaattaacatcacacccattgagtgttgtttcagaagaatctaagttttcatcgtacatgtgaatgtactcactactgtcatcgtatctcattcgacaataagatttaccttccttgaatagatatccattgagacaatttgctacaatttctttgctgcataaatcaattaacttcgcaatctctaatgctctttctaaactcatttcaacccctgttaataccgttatctactgttttctttacgtatttgtaatcgaaatagaagttcccagaaccaatacttttaaagtaccacataattataataacatcaagtacttcatcatcgtatacagtactttgttggaagtaatactcttcactatcccacggaccttccagtacttcactcggaattataatgtcatcggaatcgctgtcagtactgtagatggtaatatctgcatcattaatatagaccatgtattcattatgcatatcaatgaaacattcataatcattagggtcggtatccagtacacacgtttctgtatccagtacgcacgtttctgtatctgagtagtcattattaaggaggttatccggtacataatattgagtacttgtgtctttgaaaacaccgtaaactgaaccttcttttaccatattcatgtactcatgaatcttctttgcattttccaatgaactctgtaatgtcattttataatctcatatattgaaataataattattcgttcttgatggggatggattaaatacgttttctttttcaaatctcttcatttcattttgcaaagaaaccatttcttcaaatgtacaggagtacttattcttatcaaacactaatgcttcctgaaatagttcaccatcgtccagtactgtataatctataagactctcagattcatagtcatagccatcatgtaatacatgaataaatttaaaacaagaatctttgtagtgcatatataaactcaactcatgttccgagtctcccttaataagattacagcacaagtcccatcctttaggtaacttataataatacatagaataatcatatgtcattttggaattcctatattgaatttgtattcttgattaatacattcattaggtttattcaaggatgcatacaccttcatttcattttgtatagtaattacttcttcaaatgtacagatgtacttcttgtcaaatactaatgcagcttgaaatagttcaccagcatccatcaatgtatagtccggcatatcagtgtatggaaaatctaatgaactgtaatcaataaatgagaatttaccatcagtaaaatgaatatactcattcgcactgtgcattaaatcacctttgtttaaattacaaaagtactgaaaactgtgcttaaaagaatgtactgatattaaaaaatcaaattccatcagtactcaacctctacattaaaagattcaggaaacttagtcatataatcttctggatagttctgcattgttttgatcatctctacctgtgtagcacggacgtattcaattggtgctccttgtaaattccagacagtactttcctgaaagaattcctcttctgacagtactgtaagatttacaaaatcattacggtaattttttgaatcatcatatgtgaagattttaaaagacccattttcatatagtacaagaacaaaatgtgagaatttttgtaatgcaccacccatttccacgtccgcatgattcagtgtacagatgacctcttttttcctcataccgaattggattctaatttcttttttcataaaatctccttcagattagtactgaatttgtacagaatattacaatcagcaatgcacaataactcaagcattttcgaattctgaaattccttgcacagaacattagaactgtatacaacctctgtatctgtatccataatcaaatcacctttgtttaaattacaaaggtactgaggtgcaccattgaccgtatgtactgatattaaaaaatcaaattccatcacacttcccctagattgaaatgattacaaaaattatcttcaccagtactgcaccagatatctatacattccctgtgaatacatttaattctacgctgtaattcaatcatctcttctaatgtacagatgtacttcttatcaaatactaatgcctcctggaacagtgcagcatcatcaagtactgtatagtccaacatctcggttgctttacccctaaacccagtactaaaatccatcaaataaaagtcagcattccagtactttaaaatcttgtccctagcgtagtttaaatcacccttgtataagttagagtgcgtaactaactcaccagtgtacatccatgtccttgcacaaaattcattatattttatttccatctcaatctctactataattaataaggtaaactccaatataaagagcacgttcggtggcggggtattttttgtttaaggaaacatgaactgtactctgaaaaacacaatataaaactttatattaaacatataccttagcatgtttttcagcggaaatttttttgacccccctgcggcctgtcaaaatgaaacgtctctatttattcagcctagaaaccttgatttcttcaatccttttcaacgcacaaagcttgcgactcgtattcctgtacatattcattacacgctgtaatgcattgtcctgatattccctcactgttgtacgctcaggattgtgtactaaacacgaattcttcaaaatcgaatccatcatgaattcaaaacctttcatcgtatatggactcattgtttctggttcttcaaacgtaatcataattccaatcccctattccctctaaccttctaagatatcttgcgtaaattatttcgaaatatcgatgcaacgaaattacggattgttcataatcatcatccctgtacattgtgcatgtaagaaaattatttaaaccgtaatctaaactgcacttaaacttctcctttgcaatatcactattacttgcacttttcataataaaccctttgtaccgcattggtgtactgtgaactcagcaccactaataggtaatcaatattgtaagcacgatttcctcgttgactggcacgactggaataaagaatattatccacatatgtattgaactgatcttcaaataactctttcattagcatcatcccatcacaaaatcatacattaacaactttatcgatgtaatcttctaacatatcaatatatatggtattggttctaactaaaaggtatgcaaatccagagaactcctgtgtataatgctttacagcgtacatacaacgaagcttatcattgtcatacattgtactgtactgaaacaaactctcgtctgatagctctaataacgcttgggcttcacttctcgtgaacttcatagggtcatgtactgcatcacaaaaacaaacctgtgtctcgctattgaaaccctgtgatagatatataccttcacactcggaacgcaccgatacggcattataactatgtgttgcccccatcatatctgaactcaaaactaaaatcaacccatttttatttttaatcaacaaatctgacttaagggatttgatctccgtatgggaaatatcaccaaatcttccgggaacctcaaacttatcaacgttgtatacaatcttttgtacttgctcttttaaacgcttaattgcacttctgtctttttctaatgtatctaataaactcattgaactcattgtactttccttacatatttgtatcgaacaaaacggaactttgaatgccattaatcgacacttcatgtacatatatattttgtctgaacaaaggaactaattgaactaaactcgtttgcataataatatgcatatgtacattgtcatatgccgtttcgtattggaaacgtgctgcttcatcttctatgaaattaggaacttggactggattttcaaaatttgttcttgtactgaactgcacatcattgtcctgtaccttaataccatatgaattatcattgttatcaactacatcaaattcaattaaactaccatctttactgacgtttactatataaactgaaaatctactcataaacctatttcctctaaatctttgacaaatgtatcataatccgataatgacaaaaatatgtctgtactgatgttttgacgtaatgtattaaacaaattatgtacctgtaataaatcaggtgcataaatcagggattgctggaaatacgattcttctgtatctaatatatccctgcactctatttcacgaactcgttgatatattgaatttaataatacattttcatctttgagcattggaaggtatcggatgtacatgttctccatcaactcatcttggattgaacccctgaactgcaacacgtattcaaaacacatcactacatcttgtaggtaattggcactgtactgattactatacacgattttatgacaactgaactcggaatcatttctgaaccaattgttaccctctttcctgtacttatgactaagcttcccatcctccaacgctcgaatgaacttcataatgttaattgcaaaatcatatgaatgatgcttgtgttgatgcattttttacctcaattctgtccgaaaaaataaccaaaatgtttaaagcaagaaagcattactatgttcatcactctatcatcaaattcatcttgtgtttctgcacataatgtttcactgatattcatatgtaataattcaagctggaaactatcggtgaaccaatcaaacttacggtatttttgtttaatatcaattataagcatactatatatccaacccttttacaacatctacgaaatgttcaaacacttcttttgaaaaataacctccttcacaaaaaagcatactaaacggtggcagcatgtccgataactctttagctaaattgatttctgctcttaactcttgaacatcaatgatatcatgtactaacgataattgaaacatgaatgcatctacatcttcattcatttctgaattgtaatataactcttcagggaatttgtcggtttcgtaataataaaaaactttattgttgaacacaccactaataggaacatcattttcatctttctttgaaatgtttgtttcccatgactcgatgttattaggaacaaaaaaatcataggctgatttagaaccctgtacagaatccaactttattccataatattccgtatccatgtatttctgctgcaatgtaataccacgtgtactgacattcacttggaatatatcatctttatctggaacactaaatggaatacataacactgaattctcagggtatttggcaatgaatgcatccagcactttattaagcactggaatggcaattttactgtactgcatcaaatcatacattttaattctggtcatatcattcacctgtgtatgttttcacccttagcgattcaaaatcccatacatcactgattgtaccattgtgcctgtaatcataatattctactaatacattatacaataacttcaacgatacaaattcatgattccacggagctttattctcatgaacacatttggtgatataaggtataatatataaactaaacaacactaatggtgaatgtatacattgcatttgaaaatattcttcttcttgcatacaatgttcaggaataattagatcataatgtgtctcaaatgaatgtaaacctattgtggtttttttcgtatcacatgcgtaccatattgtactatccgaaataaatggaatgataccattattgtttgcaatgtacatcatatggtaagagcgatttgtcttgttaaatatctcgatactttcgatattactacaaatcatgtattcaatgcaatcaatgatcttatctttaaatgtaccaatttcattgaatgtcattgatttcagcacttcactgctcatatgttctccttaaaaaaattcaaatactcttcattgaaagcatatgtatcatcttttttgttatgcaccacataatcataaagagctatgaatgcagggattatgatcttacatgatttattattgtatttgtactgctccaaatcaacggtattcaatttagcaataagcatagcaacaaagatatcttcatggcggtgtactgtactgtactgaaaatattcatcctctccaatatcaggatgatataacggtatatccaaattattacgaattgacatcttatatttttgtaatgcagctaaatgtatgaaccacaatctatcttcattgaaatatggaaaaataattttgtctgtgctaataaaaatttcttcatttcgattatttgtcacaagaggtgcatacattttaatttttgcagatctaataattaaattaaaaatataatgaatcttatgaactgcacttgatgcatcttcgtatgtactagggattatgaaactcactatatgttctcctttaaaatgattacacatgataacagctttgcacttctttgtcaataccaaaacgaaaaaagcccatatcttacgatacaggcgttctgggtatgttgatttggatttcattgtacaaatcatcaatatatagacatgaaaaaaacacactatcttttaatatattgttgtggtaaagcattttaaatactacataaaaaaataaatcaatatcatcgtgtactaaattctgttgaaaccaccactcttccgttaaatcttcggcattaaaatcatcaggaactacaagggatgacatatcacaatcttctttgtactcaaaccacatgtcgtcattcggataacgttcatgcttctctgggtaacaattgctgggattaaatgttaaaatattaaaccccgtagagcaacgttctttgtttagaaatgtattattccatacctgatatttttcaccaacatcaagctcttctgttactgattttattgcacataatgtactgtatattgtttctatcttgtgaacatatttaaatgcagcatctaagctgaactctaaatcatacatgtactgcataaaattacctcaactaaagcaaggactgtattgaattccaaattacttgtaattccttgaaggtacatatactttgctactacatatttctgtactaaattataattattaaattcctcaaaattgtaatttagaacaaaatctgtactcaaaaataacttatgcatctctaatgcactttgataatacgcgtacaactcactgatatcaatactggttaaattatattgttcatatctatgatacgggatggcttcaatttcaatactataaaaccattctcttaacttattaatatcaaatgtattattcagcttcataactcaatacctccattaaacactcatacacaccatcaatcgcataagcacaaaaattgaaattaattttgtgattcttgtgtaatggactattgtgtactgtactaataaggacattataaaacaacaaacgcactggcacaagcaatgaaccttggaaaaattcttcctctgatttatatgtattgtactctattgttttattcgtttctgtatcatattttaccattactaacggggcatttttattataccatgtgtactctaaatcattctttccaataacagcaccaggtgcgaaatccaaaagaccaataacactactggcatttggggtatcaggtgtattgaatcgtttatcaaaatgactcgtgcacgcaatatatgtattgtacttcgatggaataataccaatacatttgtggatatgacgcttgtaatctttctgtgcattatataaggctgcaacaatacaagctaacttttgtcccataaggattgcattagcgtaggtgtactgaatttcattgctggtacggtacttcgaggtcataatatttcctttgcaacatcttgggcttaaaatcaataacagctttctgtatcttttttaataataaaacatcataaccacccgtgtcaattactaattgctgttggaacaattcttcatcggataatgtattgaaatctacaaaataatctgtaactatcgaatcatttaaatgtgccatgtaccaacctgaacttcttgaataaatcaaattccacccatcgtcatcatcttctaattcaacataaatcatatctggggtatacatcattttatacttcataactatatccttgcattaataaatcataaactacatggactaatttcaattgaatataaaattttaaacctttaattaatggattcaaatgcattgtactgaataacattagatacatcatctcatgcggttttgtgattaatgatttttgaaatacttcagcttcatcataagggtctatgaactgaaatttgtcttcatcataatttgtattggaatgctgatatataaaataatcatcattggtattgtaccacaaatacccttcgaatcctgtactaacacctttggtcaatggggatgctgatactggatttgaactgattaatgcacctacatcaacctttcctgatgcatcactgttctcgatttcaatatcaatgtaattccttgcgataacctctgttaatgtcaaatataaactaccacctgtcctctgactcaggattccatctatctgcgatataggatggttgttattgaggataagcattattgtactaatcttgtgtgctaataattctatatcattcataatttgccttatggattcgggtgcaataaatgatcttggtatattaaatgctcttgcgatattgcactcaaataataactaaaattttcaataccaccatttaaatgaattttataatataaatttatactcaccaataaagaatcatttaaaacatttatcgtttttgtatttttgtgctctgtgtgctctttgtgcggtgtgtgcattaatgttcttctcttaaaaagcgtttgatggcataatctaaataaaattcataacacatactatctctgttctttatccatattttgtaatcggattttatattacgcaacaaataatttgtattaattgtgtaataatctaatcgccctaatcgttccatttaataggatactcctttccttgtactatgtacgacaaaatccatccgtaatgaataggatgatttttgtctgaatcaggaataaaatataaagctgtacttggattatgactgaataaatctttattgtcaaatgtaaaatgatctaattttattatacgcgttgataaagaacgtaatacatttttaacactgaactctgttcctttgtatttttccgataattcaaataatgcatctgtaattaaatcactgaactcttgaattacaaaattctgataaaatgcattaatctctttaaactctgtatacatttcacttcttgtattcaaaaggaatattacttgtttaagatcctgtactattgttgggttcatatttgtttatctcattatgtaccttaagcatcaaaatttgcatatgaattttttgttcaaggtgcttgataaatttctgtgccatttcttcttgttccgatgtaccaagataaaataacagattaaattctgataatcgcaaagaaaaatcttcatcaccaccctttaaacaaaaatccctgtactttgtagcgtacaaatattggtttacttttttataataccctgtgttttgcatacgatctccgttcgcaatgaacttatataataatgaatgtattgttcctgtgaacgtgttccaagaaaaataaacatatcaaactctgttctttttaaattcaatgcatcttttgttaaactagtactgaattccctgtacttttgggtcttccattcttgattaattgtcttgtacattgacatatatggttcttccttgtgtgccttgtattagcctatcaaacacatcgatcatcactttttgaatattaattagtactggcatcgtgcaaatatcaatgtcatatactaagctgtactggaataattcatcttcctgcatttgtactaaattaggtaaaggataattgtctgcctcttcatcctggtacttgaaatgcataacaccatcctttttgtacaaaagaatgtcaatatcacctaactcatcagcataaccaaatatacatacattagatgtttttgctatattaaatttcatctccacctctctccgtctgcacaagagtactggtacgttgtcgttagggtaggaatcatgttcgtaattggtatgttattcacaataaccgttacaggcatcataaccgtctcttctctactctgtcctgtctttgtgcaattcatcttctgcatttcatctgaatccagatacgctaatacaaacggtgcaattccaagaacaatacacaagacgataaggaaatttaaaaattttaacataatctgtaccctatgattaacgttggtgcactatatcagtaatgaaaagtactgtcaagaacatttgtactctcagtactatcagaactcttaatactcaataatgtgttcttcataaccactattaggctcctgtttagattctttcattagtactatcatcttatgtactaatggcatagggaactctaaatcccatactaatgattcctgaaagtattcctctggtgataaagtacttaaatctttaatatcaacgtgcttgtatattttattttcgtaattaacaaatgatatatataaatcactaacataagaatcataggtaattgtgaatggcttacccttgtaatccattacatctctacatagactacttttgatatatgtatgttcaaatgatttatataccttgagttgtatattagttttcatatttctctttattagcttgtttggttttatagtgaattaaatctattaatgtaatcaagtacaacttcaaataatactcttgttcattcgtacctaatgatacaaataacttatgctcataaattaatacctgtttcactacaaatggacacttaatcctctgtataggtttaagtaaatgatagtacttattaaatctatgatacatttctaattctgtcagtactttcatattaaacacatactccattagcagtagcagtacttaaagcactcaaatacctctgtacggcttgctcttgatgatctgtacctaaaagtatatacatccataattcattgtagtgtacatcttctgtataagggttgttgtaactttttgataatatagcatcaaattcagatgcatgaacccttgtgaacttaagaatatcttgttgtgttatgattctcataacttttcctgtataagcttcttaagtatttctatgtgtgaattaacagttctttcttgatgctgtgttcctaagagtgtcagtactatcatctctgaacgcaaaagatttttttcaagttcccctatatcagttcttgtatcaagtgccatatatttgtgattattcttcctgaatagtgccaagtactcttggtttgatattaccttcatagtttacttttaatttccattaaaagtgctctaatatgctcattgacaaatctctcttgggaatctgtgtctagggtgagaagcattcttaaatctgaacctctgatggtatattctaaatcattctttgattctcgcataagtttctgaaaggatgagaagtgtaatcccatgagttcaatgtattctgctgttcctagtggttttggcattttagttcaatcgctcgtttaagtgtattaatataatcattaatatcgtattgttgatagttagttcccagggtagctagaacatagatttcatttctcttaataattttatccatatctggtatatctgatgtgttaataacaaacaacttcaaaaacaatccatttataattgttaggtattcttcgtcggtaatcattcgcatttgcatcttctcagtactgattctttaagttcatcaatgtagtactctacatattcttcttgtaggtttgttccgagatgtaacagtactcttaaatctgctctcagtacttctttatcatcttcatctatatcagacagtgttatgtttaagaatttacttgaactctctataagtaatattactgaatcacctttgcttaaaattttcataatctctttttgctttcctcgccaaaaggtacatgtacgattcttcgtattgtgcttggtagtttgtgtttaagagtcgaaacaacttctgttctgctagaactagttgcttatcttcataacaacggtagcgtatcaactttttgtattcgatgttgattacatccattactataagcccatgttcatcatctgtcaagtgtttcatgtatcttttccttaatagtgattttaagagatttaattatacgttcaacgtgatactcctgcctatcagttccaagaaggtatggtagtgcttggaatagagcttccgcattcttttcctctggggtttggtttgggttgtgaggaagttgatttgtatatctcttggcactaactaatctctcgacgtattcattatatgttaagtatatcatttcattttgcatttactttttccttaatagtaattttaagatatctaatcatacgtgcaacatattcctcttgtctatcagttccaagaaggtatggaagtaattggaataaaacttctgcactcctttccgctggggtttggtttgggttgtgaggaagttgatttgtaagttttctggatttaattaatcgttcttttaactcatcgtctgttaagtatttcatttcattttgcttttgcatttactttttccttaatactcatcataagatgttcaatcatattttgaaccataaattcttgtttatcagttccaagaacgtatggtaacttctgaaacaatacatttgcagatacttcatatattgattgatttggaacgaacttaagattaatgttttttgtttttaacatcttctcttgaaattcttcattcgttatgtatatcatttcattttgcatttacattctctcatatatattttgggttaaaaggtcaatccagatttccacatatcgttgttggtgttgcgtccctaacagtacacccaacttagcttcacactctaataacaatctggttttgtatggtagactttgaaatcctattgtagcatctaatttggaaattgcatagttgatgcgtatgaacctttcttgtaatgtgatgttaatcattcctagtacaccttagtgggcgggtcatttgatgaaagtacagcttacctctgatttccattagtaattcatttaatacgagttgtacctcttgttcttgatagttagttcctagcatagcacccattatcaactcacgtatcataatcatcttcttgtcgtgtttgatttcttcgctgtaatagatttcggtgcgtttagttgagatttttgcacgtcgctcgttatattcatctttacttaaattgatcattttcatgttaattacccttacatttattttcaatactattcatgagttctttaagatagttttttaccttacctgcctgatagttcgtccctagaaagttgcacaactctgcttctatgattttgattttcctgatatcaggcttcaatcttttgttattgaatatttgaatccttatatctctggatgcatttaaacgtttttgatattcatggtaagttaaattaatcattttcatttacgtttaacctctcgctggagggcatcaattaacatcagtaccgcattctcttgatagtttgttcctaagactgaaagcatctttatctcatttactaaaatcaacttctttgagggttcaataatgtgactatcataaacggccttacgtgctggataagttttcgccagtataacataaaattcgtctttacttaaattaatcatttgcatttacttttaacctctttctgtagagcgtcaatccatagatctacataagtgtgttgatagtttgtgcctaagagtgttaagacataaagttcagttatcattatatactttcgttcttcggcaattcttttatccttttgaatcattctccttctgattccacaggtttgtagaagcttaacatattcgaaacctattaattttctcattttaaactcaccgacttcagacgtaagctgcttaaccatgcgtctatgtagatactttgatagtttgtcccaatgaagagtaatagcttcatttcagctattataacacatcggtccgcttctgcaatagaattatctaaaaaagtccacgagacttttccttgtatagttcttaacctattgtaatactcatgctcagtcaggattttcattctcacgtctccatatctcggttctaatgtgttggcagtgtgcatcgatgaacatatctatagatttggtaattgctgttttatcagtgcctgtcatcagtacaagcatctctgcctcactatgaattaaacgcatgatatcatagggtaatatttcagatactgtatcatagtgtttttgtcctagattctgtaatagtttaaaatacattttgtgatttagtctttgtcgcattgtttcttccattctcttctggcttggcgggttttatctgatatttcgtttctcaatgctgccaggtatcgttgaatgaacagatcttgatagtttgttccaatgaatttcataagataaagttcaccgttgataacatccacttcaggtgcaccatgtaaggcattgttttttctaagggtgttaagaagagagaagagggcagtctgatactcagtgcttgataaagtcttcatatttttccacaattcgttcatttagttttatctgtataagatccattagttgttcaagataatcggtacaatatttctcttgatattgagtcccaataaagtacagcaaccatagctcatgaactttcactttcatctcgttccatgaaagttcaccgtcatcgtagattactcttgcttctggggtgagctttcgaattctaagtgaatattcatcttgtgttaagtgtttcatttacatttatcccttattagatttgtgagtgcaactatgtgttcatggatataaaaattctgatgagaagttccaagaaagtacagcatccatccctcactcttctcgacttttagtttagtatcgagttggtcagatatgttaatgaaaaccattagttcttttcctttctttctatttgtttcataagaacattgatatactcacccgcaaacctattctgatactgcgtccccatgaattccaacatccatacttcagcaaccttttcttcaatttcagtccattgtaagtacatcatagtgaagtaaatggtgttctcttttttctggcactcttagcacgggcctcgtattcaaagttattaatgatgttcattacatttgtccattatgtaattagtgagtgcaactatgtgctcatgaacataaccttcctgatagtttgtccccagtacagccaacatgcgaatctcggtggtgtttatcctgtgttcccttatagataaacattctttttgtggaagtgtaaaatatttgtttattacagcaatgataattttattcttctctatattacttaaatgtttcatagtttgctcctgacgtatttctcaagagatgacaaatacttttcctcataatactcctgatagtctgttcccaagaatgcacccaaaagtatttcattttccaatacctcggctaagtttaaatcagaagtctcttcgtatattatgaggatttcaagttgtctggcagcgatgcgttcagtatattgatatgatttttctagaataatcatagtttactcttaatgtggttctgaagtgcaataaagtattcccctacataatactcctgaaagtctgtatccaaaaatgcacccataagtaaatccttctccattacccttgataagttaagatctgcatttgaaaggtatataagtaatatttcagcctggacagatttaaaacgtttcttatattcttcaggtgttaatataatcatagtttactcttaatatcttctattaaaaatcgaatccaatcgtcaacatactcttcctgatggtttgtgttcagtacagccaacatgcggatctctgctcttgcaacttcaattgcagttttaggcaggtctttgctgatatccaccattaagtccatgtatttcaagataagtccgaatgattgggttcgtgttatagttttcattgtttcctcgtggacaatatttcatttttcaatgcatccatatattgaatcacccatgcatcctgatagttagttcccaatgtaatcaaaaggtataactccattcgttctacgtgtgtgtctgtattgtaaatctttacgtagtttttacgtaacagtgattgatattctttttcggttaatttacgcattttcatagtttactcgttacatcttcaattaaataccaaatccaatccttgacatacctttcctgaaagttagttccaatgaatagtgccataattaattcacgcttataggcaataccacgttcatgtgacttatacattatcatagccatgttattgataagtctttcgtggtgttctgcttgagttaaaatacgcatagggactcccttgaaaataatatcaatcatataatatatgaattgtataaaaagtcaataacattttattcgtaatacccctttatcgaagtcgctaaggttacccgccctttagccccctacgcattttgccatagtccaatcccttttattttaaaaaagtcaagggattacctatgcatttttttaacgcattattttaaaaacgccttgacttttttctgaatcagtactagatccctttacgcattaatccttcgttacgctaacgattatctgtgtatccccgtagtcctgccatacttccacgccatccgtcgccctggttagtcgtgctgtcatctgcttaacagtcttaggcttgagggggacttgtgttagtactgtacgcatagcatcatcgacgttatcatgtacgccagcaatcgtacctagaacgctgtatactgtatagaacatatgtatgccctcctgatatagttaaggccgctagagagcggcctatgatgtttggtgatgtgtaatgcttatagtcctaagatagtgcgtgcttcgttacgttcagtccatagctgcatgatgtgagcaagtaagtccttactaatgtatccggtgttcatagcttcacggatagatacatcataagcaccgaaccccgtgcgaacgatacgcacatcatttaggttagtgttatagataccgccaagatcaacggcttcgaatactgcatcaactgaatactcattgttaccatcgttgaagttttctagtgcaatagtattggataccgcccaacgtttacagtttccaatgatgcggcattgttccggttggagagtgccattacttacagcgtactccagtgcatctttaccaaaagtccgagccagtactaaaacgtcagcgaaggaagtgattgagaaggtcatgataaaactccttaatttaggagggagaaccatttccccctctctatgtaaaacattatacttgattctaagtactatgcaagtactttttacattttaattcctggattcaggtaacgatgtgatccgtattctggatcggtttcggtccagtactgtaaatcgatagtacctttagcgttaatcttgtctaccagcttattcatcttactgtagactacttcgctagggatgtagtgtaatcctttattatagaagtagtggttagcttcactatcgtttaagatatagcgtgcaccgtttgcggtttgtgcaacaatgaaagagtattctacttcccgatcattaccatcaacagtaatgcggtcgaaattggtacggatgaaagctttaacgatagcgattgaagtactcatgatgaagctcctaactttgtgggccgtcgcaccattgccgccctacgagatacattattgcagtactgctatactttgtcaatacttttttgaaatagttttgagtactggaattacatccaccagcagatagttactcaccgttattaactatcttacagatacttctctgcaccctgtgggctagtttttgtctatgcgtatatagtactaaaggagcggaccgaagtcaactccttttttattcttttttgttagatgattctccaatcttctaccaggattttaatataccgtaccagtgattcgagtgattcgtgttctcgatagtctgccgctccaccagcggtacaagtacagccgattaagccgttttgtaattccttaatctgtacatcgataaggttggcttttgcttcattcagtactgcaaccaattcgttagcgattgacataatgttttactcctaaaggtgcgggagaactattcccccgctctatgtaaaacattatacattatcttgtagtactgtcaaatagtttttatgagatatcttcgatatagtcggcccatgtcattttttcagtactatctagtgcaccaggattatttggatcaaaccattcgccatcccctaagtacattgcagccgctaccgctttatagccattataggcgttattccactgcatagcacgatagatatggcctttgattggtgtctgtactggtaatgttttatggtcttctacgtaggctgtagcgattggatttacccgatacgttttgaattgttccatgatgtttcccctttagttagtaaagttatcacatcagtactatcacgcattgtcaatagtactgaaataaaactttagattagattattgatgccgttgatggtagactcgctttcttctttctcccattggcggtaatacttccatgcttcatgataggtggcgatcagttcatctttttgatcctgagtacatgccagtactgaatcactgtaagcggtgttatagatagaatcaaatgatttcttctcttctgccagggtagctacttcccgcatcagttcatcaaagttagccattttagtactccttattagtgggggaggatatctccccctatgtaaaacattatactttgttttacttacaatgcaagtactttttaaattttatttccgatatagtccggcctgttcttttcggtcatacgcttaagcattttttgcatatggcttattgcttgtagtgtatcctcttccagcgatgaatcaagataatcaggatcattcttcaccttacaatgattatgatagcgtagtactgccagtacttttttaacttcttctactgtcataataagtattccacttcgttagctttcaggttagtatcgatcatcagtggttttttgtagtccacaaaacgattagttttctcgatagcgaagcccatataatccagcttgcttacagtacattcattcttaaaaacttctttcgcggcattgatggctgattcaattgataaccgaccatctaagttaatgttaccaaatgatccaccagcagaagtaggattaccgttcatatctttaataatcatagtagcggagtagctggacataattttgtttccttttattggtggggagagctattctccccttgatgtaaactattatacagtactgatatactttgtcaatacttaattacgtttaaaatgatatgtaccgttatcatcctgtacgccccatactgatttaccatcaacaccagtgaagccggattgtaattcaatatggaaaccgttagcatcaacgacgaaaacttttttattttcatcccgatagcattgatattcttcacctgctttaaatgctgcatcattcagaagatttgaagcgtgaacgcaagtcatcgtagtcatgattttattccttaatgtaccagggagaaccatttccccctctcgatataaaacattatacttgattctaagtacaatgcaagtactttttataaaatagttttcagtactgaatacttatataatagatacacttccgcaccctatgggtcagtgagttatctctcaatgaatatataatagcaaagggactgactggagtcaatcccttttttaatcttttttatcgtgttattgttacggtttttacatcacgctttttatagtactgattccagatattgcgggttaaaccgtaatcaagtactttaatcaagccgttgcgatcctggcctatgttcgtcttgctgatatcaatgatcgttagtgttgataatgtatcatcgacgtgttgtagtgcatcggcaaaatggtgttggcgttcaatagttttacgtttagcattgtactttaattcattacaggccgttatgtgctttgcactacctttgcttgcagtactcaaacgatccataacaataaacagattatcaggatcgcataaatgcatatgcacctttgcaaagtactgtttaaggtgcggacggtcataatctaaaaaattccataccttacattcagtttcattttgatctacgccagcatcactattagcgaccttaatcactaaccgatcatttaaagcgaatacaatacgggaagaaccagcaccgacgatctccagaccagctaaccgacaagctgtaaggatctctttattagtttccattgcatgaagtgaacggatgaatttagtatagttacgcattgtgttgactccttgagttaatgaaactatattacagtactttactatcaatggcaactactttttttacttgaactgcgtggaatacttcacgcgtatttttagtactgaatacttttgccgtaccttgttcgaccgtaatacgatagcgaccgaaaacgtccaccatgttgataaagtccggtgtactgaatggagttacccggcatttaagaacggttaacagttccaccagcgttgtagtctctttgatacgtttttctaaagtaatcattttgttttccccgtgttggtatagatacatagtactaaaacatttgagtactgtcaacgtgatattagttttatttttttattgtattgttggtgttcatatagattaatttttccagtactctctatcactattctattgttagtgtctacatcgataacacgtagtttcccgttgcttaacttcctgggtaatagactaccattaataaactcattagcaagctgtacggcctttgtgatgattctctgtggggctttatagtgtacccgtaatacattatcgtttgatagttgaaccttaatcattttgtttatcctataaaaaaggcgggaatagttcccgccgtgttgttagtactgcaaagttattagataacctggcggcgtttactgtatactgttacacggtttcctttacggtcatgacggatctctttctggttacgaatcagttcacttggacgcttaaggtttgccaggtgatccgcgtgagtccatgcattactattcacttgtacttgaatatcagaacctttcaagaagtcatcttgagcgttcagtacttcagccagttcttgagctttcttcagttctgcttcagtaagtactggttcaggtgaattcacaatatcagagatctctttgaactgtaccgcccagcgttgtcctttcggtgcatctttgcccatgtctttaaatgtttcaccttcttcacgagcaacgatgcgagcttgttcacgggtagcgaagaatttagtaatcatggtgtacatcctattagttaagttaattagtactacaagttagagtctattataaagtactatctgggcaatgtcaaatagtactttaaatggattctattacatgtctttcttacgttttacatcgtagtaacgaactgtaatttctttgttgatctctttctcaatgtggtgtagtactttctctttcgggttgaaacctattacagtttctttaatgatctccaagcccgtgtattcgccttgtgtaccgtaaccgtaagtaaaggtttcatgtcccaggtcttcccagcggtcaccaatcaatgcagacacgtagcatgagtggtaagtattgccgtggctatcagtccaccgattaactttaatgtcaaaggaagttacaattttcatttctactttctgggtaaggatcatagccattttaatttctctctttgttaggtgggggaaccattcccctcacttgatgtaaactattatacagtactaagatactttgtcaatacttatttgttttcttttcgtaatttcttttcagcttcaactacattacgatttgtgcaaaccacttcatcggataaatctaacttccatccagccaggggattggttgcttttttagtgttgtttgctgctttcatgatgtttccttattaattaagatgtaaactattatacagtactaaaaactattgtcaaactattttatcaggggaggttttcgtatgtcttactcctggactacttaacggggagttacttgtttcgttccccgtcctgatgtaatacattatacgcttatcgtgatactttgcaagtactttttaaaaatagtttttacttactcatattaacaggcttgaacggtggcaatgtaagatcatgcggggttaaactatcatgttttgcccacataccagaatccctacggaataatacattattgttttttatacgataaaaattaccattatcagtatttttgtaccatatcatttcatttactcctggttatgtcgttattaaacattatacgcttatcgtgatactttgcaagtacttgatagtactagccaccagcatataatagatacatttatgcaccctgtgggctgatttgtttctatgcatatataatagcaaagggactgaccggagtcaatccctttttcaattctttttaaacttgttttgggttgcgatatgtgatagcgttcgggtacatttgtttaatgttattccatgcctggttaacattataaccacttgagcgaatcagttggttactaccgacaccttgaaacactacttcgaataaaaattctttcatgctgcaatcccctctgatttacctttacgccaggcgttagccagttcattacgttgccatacatccaatgcaatgtatagtttagcagtatcccctttagggtattcgccagtagtgcctaaccgataaaacagatctttcagtactgataattctacttggatcattgtattactcctgattgtgttagtacttctacgatggcatgaatgatcataagtacagctaacacaacaatcatcggattcatttgcataagctgtactccttctattaatctttcagccaatgatcttgaatgaatttttcacagaatccctgtttcatagattctaacaggcgttcgcggtgagcggcggcatattgctcagtactatgcgttacgccaggttgataacgtgaaacaccgtccggtccgatatattgaacatcccacggtttttcgttagtatcagaccatttacgaacgattagttgaccttgcatgtttctttcctcttagtggggagaatcatttctccccttcatgtaacttattatacagtactagattacattgtcaatagtttttattcaccttgtttgaaattagttttctccattgattccatgattgcaaccaatacagcatggatctcacttaacgcggcatcactaaaagcattaatgaataggcaatcattctcgcgaatatttttaatgtacttatcagcagtggttgcgaattcattcaacggcagatcaaatgctttatcccataatggatggcgtaactgtaacagtactggattatcacggtcaccaggtgagaaagtgcctgtaatgaaacatacaccagggatactttcgaattgacaacgaacttcttttgtgatagtagtatgaatgtacatttattgttatcctctattaaattaatattacagtttatgaatcaattctttatctaagcgatagcgaacattattgattgtaactgcattgtttttaatgctacgctgtacaggtccaccagcaataacaaacgttgctttattaccccgaacaatgatagcacttccaggattaccgaaatcatcttgtactaaaatgcttgataagttttccatttgtctttccttgtagtggggagaactattctccccttcatgtaaactattatacagtacttaaaactaattgcaagtactaggataaaatcattataggatattcacagttaatcagtacttcaaaaccaaaactttcataccattctttaagattaaactcgttatcttctcccgtatcgcattctaagatgatacaatctgaatcatcggcggcatcaataaaggcattcattaattcagtaccttcaccgttaccgcgattatcgggatcaacataaagagaatcaataaacgctacacgatcataatcaagctcaggtgcaacaatgccacgtttaacaaaccagtactgcaattgtgctactttgccttgtacttgatagccagtgatctcaccattgtcagtagtacgcgtgatatgttgtatacccatgatttcaatcctcagttaagatataaaatattatacactatctttcagtactgtcaatactttttatctcatagatctatgccaacaattacgcggattgcgtttgaatatgctatcatgatcagcctggcaagtgatgcagtacttacaccccttaacggcctggcggcgattctcagggattttatcgccgcagtcgaggcaatgtatcagtgattctatttgtgcgttaatttgcgttctagcgtggttaacagcgacctgaatcactgcgttaatctcgtcttgctcggccccatctttcgtgaatcctacagccattattttaacctcattataaaattactatagtactgtaacgcgacaagtatattacttgtttttactttttccaatccatacgacacgacatattcatccccatatgtgcggatcaccacaccatgaaaatttttatacacttccactactaatcataacctttcgtctaaccaactgcatagaattatactactttacgcaaattgatcaagtattgatcagatcattttttgatcaatattatacagttacatttgtgcaccctatgggttagtgacgttctcgtcttgatgtaagtattatgccagtactggcataatttgtcaatagattattttaacttttttctgtcattgattaatgctttcagtactatactaatgatttgcaatgattcatcaatgactataaaattattttctttcattagatgatagttaccattgattgtatattctaaggagtactgtttacgtttaatttttgataatgtttctatttgtttttgtactgatttcatgctaatcattgttaaacgtcctgtaacgcattctaacgagttaaacggtttagtactggcattgtatagggtaaaggattaaagcccaccagcgttaaccagtgggcttatttgttacatcttgcggataatcttaacagtatctttcaccgatttaccgtcttgctgacattgctcgatcatcgcgtattgttctgcggtcagatcctcgccagtttttgccagtactgcgtcgatgaatgaatctaatgctgtcatgatttttctctcttaggttaagttaactactgtttataaaacttattatacagtactatcaaacattgtcaatagatttaatagtactggtaatatattttagcggtaatcgtcgtatgctttattaacctggcgaatgtaactttcaaaggcttcgtctaccgtttcatactcccgaacataatcaccataggaaactacatacatccctttttgatcttcaaacgtcatgatgatagaatccaggccgatgatttcagtttttgcgataatagccattttagtattccttaaattaatatgcgttgtcttgataaaagttattatgccagtactatcaatctttgtcaatagtactgtgataatatttttagttaatgatagtcagtgtaaaattgtaatcccctgcctggtatagtactttatcgccgaacgtgccaacacgtttcatattgcaatagatacccataacattttttacatctttgatattccgaacgccagtgatatccttgttgaaattttcatgatcagaaaataaaacttgttttgcatttttcagtacagtgcggatattagccattttgtttttcctcttagtggggagaactattctccccttgatgtaaactattatacagtactaaaaactattgtcaaactatttttttaatattattcgaaatcttctggaccggactgataatcatcttcaccgtatgcactttctaacttctcgccagtgtgatcatcagttagtgagtcatcctcatagttcacgtctacgccgacaatgtaaaactggctatcgtctggattattgaaattaattttctgaatgtttacaataactgtattgatacccaggacacagccatcagccgttacaaagtactgatatttttcacatccaccactattgaaaccgtaattgatttcggcccgaccatcatttaaacgcagtgcctgagcgatgatttcgttttcaaagttagattgagcaattgcaatagtcatgattcgtttccttattaccagggaaaccgtttccccttgcgatgtaaaacattatacgcctattgagatagtttgcaagtactttttatcaaatactttaaaatagttttcagtactcaatcattatacaatagatacactcctgcaccctgtgggctagtgagctatctctcaatgaatatataatagcaaaatggctgaccgaagtcaaccacttttttcatttatttttagctttaagcaatgccgctttgcgtgtcatgccttgcttgatgtactgctttactttcgctttttttgcgtttaccttatctgctttcgttttagcgttatgatagataatattatttggattcatttaaatcaccataaagaatagataggttactaataaagccgccagtactgcaccgactagggccgaactatagtaagctaatgttttcattttttagcctgaaagtaatgtttaatttgtgcggcggtaagtgcacaattacgcaggaagttttctgtataactcttacgagtactgaaagagtactgacctttcccgttaccgatagtaacatcaaaccgagcgttatattgtttcattttgtttctcctagtatcgggggaagatgtttccccctatgcaaatcattatacagtactgaaaactaattgcaagtactttctaagtaatgtttataagctgaatcaactactctttcaataacataatctagcggcactttaccaacttcatgactacaataaaaaggactacgattagaatcatcgtatgcaaatactttttcaggatctgcatcaatcacatacatattaacctttaagatgtctatcttatcctgtacagtaagcatattacgccgccttatcagtactggcaaccggacggatacgggccatttcctgggcttgttccacactgtaacgctcataaaggcggcattcttccggtgtaggaacagcatcaatacgtttcattggtttaatgatgctttcaacttcattcagtacttgattaacgttcatggtataatccccaatataagcggcctaaatcgaccgctaacgatgttttgattaataggtgtatggttgacgctcaaacaatgattgcacgttgtacgccccgctaatgggctttgctggcaaatcaattttatattgttcacgcttaaaaataataaaacggcaattgtttttaacatcaaaattgattgaacgttccaggagtttaccatcgtgaacaaatacaagataaccgcttgctacttgttttgtagtactggttgcaaccatagaccgacgaacatgagtacctgcatcgattaaagtactgatatttttcattatacgatcctcttaagttaatttaatttctttcccctatgcagacaccatatcaaagtatctgcataaagtaaagctaattaaagatcttttttgcgtttaacattctgtacagtacaatgcaacgggatattaagatcattgcacacacgagtaagggaggtttcatcagtattaagcccgtctactgattcctttaagagagataacgccgtttgttgatatgcatcttcatagccataagtaaatgattcaaccgccagatcattcaaaccgttatccagttcaacgcttacatgacaagaatgataagtattgccatatgaatcagtccaacgtttaccgtcaacattgattgcatggattgcagccagggaaacggtgttaatgatagttttagccatttttgtattccttaaattaatatgttgtcttgataaaatctattatgccagtactatcaatctatgtcaatagtactgtgataataattttacttactttttgctttctttacagcttccacctggtcggcccactctttaccccatacttgagcattatagtgatactgacaaagagcaacgccccgctttaaaccagtaatagattttttaccacattgacaagttttcatattagtttcctcattatcagggagaaccatttctccccttgatgtaatgtattatactttatctgatttactttgcaagtactttttagtttaattcatccaggcataagatacgatctacgccgagatccgttaagctaatggttggcacttgataggtttcaatgtattctacactagcccactgaccgaactcattcaccgcccaggtattcattgcaaaatgtaattccgcacctttcttattagtaattacagcaacagtagaagaattgccagtagtaccagatacgcgagtgattacgatagccattgttttgattcctattcagtagttgatgtatgtattatgtcagtacttaaaactattgtcaaactattttttaaagtttatcaatgattgatgccgtttcattgatagtcttgccgtgttttgcacacgcaataactgctttaaattcctttgatgaccaatctttcttgctgcatactgacattacttgtaacgtgaaacaatccagttcataagtattcatctttatatcctcagttagttaaggtgtttcgccttgatgtaaaacattatacgctaatctctgaatcgtgcaagtactttttattactttttgcaaaatactttaaacgtcctcaatcgcattctaacggccttaactccaccagctagggcgatgcatcagataatcagtttaatgcgttagaatcgtttctatgcggtgctagtggactggtatacaatagacacaaaaaagcccactgcttagagtgggctagtgattcagtactttaattgttatgcttcaactttgcggtgagcttcgatccattcctcgcgagtcataccgctttctttgattgcatccagtactaccgcaatgcagttaccgcgtacaggaatcaaatgttcttccccgttatcaaggacaaccgtaacacgttcttgaatccattttttaggcttagattccggcttatcttcaccgtacttaaccgccagggctttatgtgccatttcaatcaccacttccagatctaaaccagacaccgccgcctgaatactttctattgttgcttgcagttctgcttcacgggcttttttctgttcttccagttctgctacctttttggcttgtagttctttcgcttcactgtaagcaatgttaaaattgttgcgtactgctttcatggtatcattatccaggtcagccagcaattcagcagcaataacagtatcgttagaaatcagtgctttcagaaatgattttacattagccattttataaatcctcaattaaagtttaagttagtttatcaaagtttgtttgacgtgtccagtttttcattcgacttactggcggtctacttaatgttccccgtcttgatgtaatacattctacgcttttccctggtaatgtcaactacttttttaaaactattttcaaagtataccagtactacaatactacaataaaaaaagcccacttcttatagtgggctagtgattcagtactatattataaacaattaattacgccagtgaatgtaactttctctgtatccattacagtgacagaaccgcgtttactttttgcatcgtaatagatggtcgtgctaccctgatcatcttcttcatggtacgggccattagcaaacattgcaggggccagttccagggatttggtaacgatctcagccgtttcctcgttagtcattgcaacagtgcactgaatgaatttttctttcggtacatcaacggaagcgttaacagcgaaagaggaaacagataaagccagggcgatgattgcagttttcatttgtatatcctttgttagtactagggagtattcccgattagatgtaaaacattatacgcgtttaaaaactattatcaagtactttaatataaaagtatttgaaaaaaagtcttgacaactgcatccagtactggcataatatctacataaagacgagatagtcactaacccacagggtgcatagatccgtctattaaatgattcagtacaaaaaatataaaggggatcatttgatccccctggttattacttagtaaggtataaacaaaaatcacctttctttgatactccgcaagtgtaacgcgatgaatagttagaaacgtcttgtacttctgcaatgacgagcgtatcatcatttatttcgtcacaaaaacatacagccggatcttctacgccgatattgtcagcatgttcccgcatagatttaaccagtgcttccagttgggaaagagtagtgatattagccattttattttcctcattaccagggagaaccatttctcccttgatgtaaactattatacagtactggaaactaattgcaagtacttttaattaaattccataaaatcattttcaacgtgcacaacaatctgatttttcttgtagtcaactgcgaactcgatacaatcgtataccgctttttccgttacgatgctatgagtaccaatcggactaattggggattgaattgtttcaatctcgttaccttgctcatttacaattaaaatattaaacattgccgttactcctggatagtgttaactcgatataaagtattatacgcctttattgcttagtgtctagtacttttaaaacataatcaaagacaccacgcacatcattgatcatcgcctggcggttagcaggtaacgcatcaggatcgccactatcccaggcattaatgaagccacctaaatcatggaatactttattctgtaacccgattaactgcaattctttttcttcaagctctttgatacgttcaattaaatcactcattagataatcctcagtactcaattgtaagatccgcaacggtcgcagtagtgcccgtcctcgtcatcgtcaatgaattgaccgacgaaatgatctactttcgctttcaggttattataatcgttttctacttcctttaaacgcttctggtagtattccagtgctttaagatatgccgcatcagcagttttctcctgcatagctaaattcatgccacgcgtttcatcgtacagccaaaaaccatcggtgcactggctaatagataatgacttgcttagtactgtatagttaattactttactcattagataaaccctcaataaaggcgggaaccattccccgccattgattcagtactgaatattacattccaaccattgcggcacgaattgcagtagtactatacttaaagccgtccggcgttgttgtagtaccgttggcttttaatctgcggtacatacattccgcagcaatatctttagttttactttgtgcgatgcaactttgagcaagccgatacaatgactcaccgttattaatccacaatgaaacattccaatgagttttgtttttgtgaccgttgtatgttttagtagtagccatttttattaccctttcgttgtgagcgggagaatcattcccccgtctcgatataaagtattatacgttaatctaattactttgcaagtactttttagtgctttttataaaacatctcagcggtgatatttttacccgttggttgtactttatccaggatcttttggtgtgcactacgcccgaaagaataagaaccgtaaaccgttagccagtagtcgccatttttgtttacatgtaccgcacaataaggaacgccccgcgaatcgtcaccaatgaagtgtgatactgtacccgttacgtttggcgttgtagttttgatttgttcgatcatttctcttactcctgggatataggcgggaaccattccccgccagtgattcagtactgaattaatatgcgatagattctactacaccatcgataacattaaattgatattcgttaccctcaatcagtcctacaatgttttcagtagtaaactggtcttcataagcattttctaaatcacggtacagcttacaagataattctcggatagtatcagtcagtaagttttccagatcctcagctaatgcagcctgttttacagttaaatcagtgtagcgagtatcaacgcaaccgcctaccgtgttttcgtgtgcataacgcgattgggaacgttctacactcatttccaaatcatcttcgttcaacaggtgacggatggaacgatatttcgttaacgccttaaccttgcgtaaaaacttctcagcgtcaacgtggtcagtactgattgatgcaccgtcaccttgcgaccaaaaaccactgtattgcaattcagcttcatctatgccgtattctggcagtactgtttctttatagtattccagtactgattcagcaaagaaattatcctcacatgaacgctcacgatcccgaaccagttcaatagccgccgtttgttgttctgcgttcagttcagaaaaagccataacaaaagtagtggtagtgatagttttcattttgtaaccctcattcagtagttgatgtaagtattatacgcttttataaatctttgtcaaactattttatcaggggagtttttcatacgtcttactcctggactacttaacagggagttacttatttcgttccccgtcctgatgtaaaacattatacgcctttaaacatagtttgcaagtactttttaaaaatagttttcagtactgaatagtaaaaaaagtattgacagcattatcaagtactggcataatataccccatgacaacagctaacccaccgggtgcacaattgtaactgtaataaactactttttctatagatacactcccgcaccccgtgggccaaattgttcgtttcaatagatacattatgccagtactgacaaaataagtcaatactggcaattgtaaagatttgtaaactacttatactgcaatcgcgtccaggctataataataataagtgccgtattggtgtactttattaccttttatttcagtactgaatgaatccgaacgattggcatatgatgttaatttaaagtactttgatttgctgatacgttgccatacaccgcagatccgctgtaagtaagtagttttattcgtggtagtatcttttacggttttaacttcagtcatatacatattagtcatttttattactccaggttataggcgggaagtgttcccgctctcgatgtaaaacattatacgccattaaacatagtttgcaagtactttttattcaagtactgcaatctttttagtacggtacacggtaacgcgattgcccttgcggtcgtgctttatttctaccacgcgacgcgatacactatcaggacgctttaaagccgctcgccagtactggatcgatctggcggtactttgctttactacggcccaacgtttaccacgttcagaatgtacgcccatatctttaaacgtcgccccgtcctggcgtgcagcaatccgagcaagttcacgcgttgcaaaatatgtaatagtcatgctgttacccctatcgttgttgtacaaaaagaactttattataaagtactatcaccgtgcaatagtacttttaatctattctcttacattccaaccatcgccgcacggatcgcagtagtgctatacttaaagccgtctggagttttatcttgtccagtctgttctaaaaatagcatcatatgacgggccgcatcattacgattagtgtttgcggcaataaagtcctgggccaaccggtataatgattcgtcgttattaatccaaaggcttacattccattgagttttgtttttgtgtcctaagaacatttttgatttagccatttttaaatcctctttattatagtggggaactattccccacctgatgtaaaacattatacgcttttaaacttagtttgcaagtactttattaaacttatttgtaaattttgccactgtcagcccataccaggaaacgatgcatattatcccatgcatcttgttttaaatttaaaccgtgcaattcctcagtagttgccatccctggtactggcttactacacaccgcgaaattttcgcccatgtactgataaaccatcgttaaatcatttgagatcattatatggatcattgcatccagcattgcagtagcggcgtactgttcacgcttaagcggcaacattgcaataagttcccgataagctgcaatgtgaatttttacagtttcagccggaagacctttcatctcttcgcggaagtttaccaggttaagcatgattttagtgatttgagtcgccatcgttttaatctctcttaatgtgtagtgggaagtgttcccgctctcgatgtaaaacattatacgcctttaaacatagtttgcaagtactttctacatgtacttttaaaatagttttctttctatataggagtactggaacaatccagggagaacaatctttcagtactgaatcagtactataccccgtaaaacgtcctcaatcgcattctaacgcattaatacacctaagctatacatttgcaccgccaccagctaaccagggctttacgggccgtttaaacgcgttaaattattttcaattattttgtttttagttattgactaagcaccgaaaaagcgtataattactacatagacgcgagaaagcggatacccctgggggtgcggaattacgcccaaaattcagtaaatttaaaaaggatacactcccgcaccttagcaggtcatagcactttctcagtactgaatcatagtaccatagtacgccccaggatggcaagcaaaataattaaaactttttgcatttaaggtattgctttattttttcagtactgctataatattttcatcaagtcgagaaagactctagcccaccgggtgcatagttacgcccaaaattcagtactagattattttttaaaattattcatccaggcggttgacattgcccccagtttattagataatgattccagattcagaaaaatctaactccagatactgcggggaaaccatcccaacgcggtagggtaactattggaaaaaacagaataaaaattttgatttagccgtctatacatccagacgtgtaaccatctagccgtttagccgtccaaacgtctagcagtacagccatctagaaatctagccatccagccgcctagagggatagccatctttacttccagccatctggaggtctagacatctctacgtctaaatttaacctagggttactacgcccaaaatccgtcagtactataccatagatctatctttatgaagggagtattcagtactcccacaatagccctcactgttactgtaggaggatgaagactatcatgtagtactgaatactgttagtggataatccaccagcttgtgcgggtggcataatgcgttagattaatatcagtactgctaccattctgttaataacagtactgctaccattctgttaataacagtactgttcatattacgaaaaaagaggttgtcaaagatgaactgcctcaaaggaggattcaatctaatcagtactgtctcacgacaggaggtagagtgaatgaattgtttgcggcaactcatctctctatgtagaacattatacagtactgaatcataaagtcaatagctttctttcatcattcagtactgaaatcatataatctgtatcgctacaaaactcattatatcccacaaatcctatatgtcccaacgtaaatttcaactttcgaagatccaacttttatttcataggtactccaaaatttttaggatcgagatttaggatggagtactaaccaactttttgctggagcctcaaggggtaattgaattttaccccgaagggtaaaggggtaattgaaattaaggtgaaagtaataattcagtactaatcattgcgtgattacttttgattacatttgatgtaatttgcaaaatggaaaaggagcttggaaactacaaagtacggcagacttcctctgcctacttagtggcatatcagtactgaatcattcacacacatttacgtgcattcttgagcaatcttgtctatactaatcagtactgaatcatatataatcattctgtgattctactgtgctcatataaatgtttatatatgattacttatgactacctatgattacggggtttagcctggggagaatcctagtgatcgcatttgtccaggctgaattttaacatatgcaacatatgttaaagcctgtataatgcttccactacggagcttcccctagctatattacttcctatatataatcattaagatatagtagtactgattgtactgtacattctctttaatattataagggtctatagcaatctcggtacatctgttaaatgcatatctattaaatgccagtggaattatagatctaatccatacttgttcattttcttttagtttacttatatagaattctttatgttctttattcatattagttagtgtctgtatataagtaatagtaagaatacgtactgcacatcttcatctttagtattgagtactgtacgtattgcgtcattaaacaagaatatagtacttgggtcatgagaatttaaaggggttctgggtacggcatgtttgtagttccctttaacaaattgtgtgtagtattctctatgcatattagtacctatatattagggcgagaatgtagtacaattcatatggaatgtaatttggggtgatcgcacactgtgtatggtaaatgaattgttcggtatttttcttatccttgatatctattgggattagtggtataagcatttgggagtttagatccagatggcttaagtagaattctttatgcatattgttctcttagaatacgaaagctaggtacagggtatgatacagtactcgatggtagctgtcaaaatctagtatacatgctttagtgcacatagtaaaatacactttatcattttgtgcattgataccgcgaggtttatctaatagattagttctgaggtacattgggaaatattttgtgtagtattctttatgcatgttagtacctgaatataagtaggatagtgttatatagctggtcataactactactattttctatacttcgttctatgcagttattgaatcccagtactgccaaatcgttatccagagggactttatatctggcgtagtgtacaaaaatgctggggagaaattgtgtgtagtattctttgtgcatattagtacctatatattagtaaaaggatgtgatacagtactcgattatagtcgtcaatatatatcgaggatttagtgcactgaatgaagtagtctttttcgtagtctttttctatacgcaatggttctgttggtacaaggtgttggagatacattgggagtttctctatgtagtattctttgtggttattcatattatgtgttatttcgtgaaaacaagggttagtactgcatagtacaagtcatacgtatctttagggttaatagcacctttaatacattctttcattaattcattatagataattttagtactgaatgtattggatgttactatatcggaattaaggtacgagaggtagaattctttatatttgtgcatattagtacctgaatgttagcattactacgtagtacagcatatatggattatcatcgtatatgagcgtgtacttagtacattgttggaacattatctttgcgtgttctttgatacccaatggttcttttggtatatggtgctggagatgcatagggattttatccctgtagtattctttgtgcatgttgttctctttagtacttatatattaggagtaaaatgttatagtactggttcattgcgtcatcattttctatagcacgttttacgctattcatgtagttagatcgagcggcacgagttatgagaagaactttgtatgcagcaaagtatttttgctgcacgggtagtttagagatatagtattctttatacatagtttgtaatatacgtaatgaggtgatgcattttcttattagtactgataagttcctgtacatgttttgttagtttgtacgcgtttttatagagtcctggattatcgattacagtactgtacatgaattcttcttcctcggataattctttgttttgtaattctttgaggaattgcagtactgtatcagtttcgttagtacgttgcttttggaagaagtgcatgttatcgtgtattttttctgaacccatgcagtacatatctccgatttggaattgtgcagtactgatatcatgggtgctattacaattcccgaagaagtatacattcccgaaagatagaattatagtgcacgggatattatccatgtgtatatagatagatgcattctttagtgcttttgtgctggtattagtactcaatacttttaaatcagtattatagatattaataaaagcaagagctatcttatttttcttcaagtacgatttgaggttcttagatacgagaacaggtctggattttttctttttatttcgtttctttagtacattagggtgatacgtatatgcagatgtaaaagattctgcttgaatactgttgaggtacttaaagtgcttaaggtattgtttgctgtgtgcattaagtttcatttggtttcctttatacagatgcgagagcgaggatttccctgaagggattatcttttgttagtgcgtgatgaatgcagctattgagattaatatttttagtactgttagttgccaggttgtagtacttcacgaaggtgtcgtacatgaaacggtcttttatggttatatgttctatatagaattggttcatagtattccttatatttcaataagtttcagaacatcaatatacatataacgttccgatgacagtacacgggtagttataatctcaatcgatatgtttttaattagaggtgaagatgattggtggttctgaataaatgtgtggtgcatactttggtctatgtggtttagtttattgaagtagtactcaaaagtgttcatgtcttccttagatagagattagtttcattacttctctgtatgtgtacttttcgttttgtgcatctcttgtgacgacatatagaaaggtgtgtttatcttttttgttcccgcaattgtagaaaatattgaacttattgaagttgaatctttcggcgtgttgtagtttagttaaatagaattctatgttcattttcttccttagatagagattagtttcagtacttctctgtacgtgtacttttcgttttgtgcttgtgttatagctccgatcatgtacagtacttgattctttctgctcccatacttgtagtacttgacaaatgttctatacatgtacttgtctctgtcggatagttgttggtagtagtagcttatatgattcattgtaattagccttactatgttaaagtactcggtccctggtgtaccttttagaacttaaagatgaggttcaggatagagcggtacttagttgcagggaacgtatgttctattgcatcacgtgtctccatcctgaaatcgtaattgtaatatagattattctttctcataggtggtgctaaagagaatgttagctgttcttgcttgtgtagtttactacaatagaaatctttatgattattcatagaaatatattagtcctattaaacctgagtacataatatttttgttattgcattcgattgcttctagagtactacgtatacaattattaaagcaatctctggcgtgtggtgtatctatacttaaaggtgatacactccttagaaacaattgttcttcgttgctaaggtatttggtgtagaattctttatgttcagtattcatattagtactcgattaaaagggcaaggatataatagtattgcatactttctgccccttgtaaagcatttcttatgatattactcctgtacgagttcaggagtttaggacaacgtttgtagtgtataaaagtattttgtgtatacagtaggctttctcgtagaccttttgttggtagtgcatcaatgtagtactgttcaatgttcatatagatagcagtactaagatttttgataattgtttattgctatccccgcagatgttgctgtgtaaaatactcacaatgagggtatcaattgcattgttcatcataagggtgcatcctggactattataattttttagctcaattagccacgaactatccgcgagaaattccccgtactctagttcatttagagtattgaggtagtacttaagagtatttgtcatgtgtagttctccttatattccttctatagtacaacagtactgaaaggatgtcaagggttttctttattgggtaaatatgatataatgaataaggagggaattatgttaccttttgcaagaatggttaagtacgggaatattgcccctggtgatgatggacgttttaaaatatattccagtgattccatgtatcttcatgatacttatactgataagttgtatgcatcttctgcgacgaattggggtactggtacaggtgtagcatcgagtaaatttattctttgtgcggagaatgttaaacgagttctattggaagataacagtagtgattgtcaattgtacgaagagaaaggtacgggaaaagtttttatcactggcaacacgaaggcattcactggtgtaactgatagaaaaactttgtggacggactgtactacatggataacatcaggtggtattaatgtttctgatataaaatacatgagtagttttaatgatatgaaggtaaatttgataacaaacgatggtacattgtattgttgtggagctaacaataactctaacctatcatcatttggtgatggtacaaacattaattcttttaacacattcaaaagggtagatactataacttcggttaaaaaggcagttggtaacatatacctaaaagaagataatactttatggggttgtggttttaactattactatcagttaggtacaggcaatcaaacttctattactggggtgacgatgatttcttcggatgttatagattgtaatgtcagttatcagagtacattttttattaaatcggataataatttgtacgcttgtggtaaacagttcggtgcacaatacgggaacgaatttggcacaggtggtacttcttcatctaccgatatacaatacaaaactccaacattattgagttcaggagtttatagtttatatacttgtgttggtaacatggcgtcacatatagttaaaggtgatgaagtactttatgcatctggttcgaataggggtggtcaattaggtgttggtaataataataatcagtactcctatactccttcttatacttcttttaatagttcgtgtgatttggtacgcagtccatctggttcacttatacttacggatactggaaaattatattattgtggccttgcaatagtagtaatgggtggtatttctggacagaacgttcttaattatacagaagtagatatgtcatttatacaatgaattaatatgccagtacagagtactggcttttctttttgattaaatatagtataatgaataaaggagggaaatatgttaccttttgttagaatgtttgattatgggaacgtcgttgagcgacctgtgggtacacgttatacctgtagtgactatagtgcgacttatagtttaataaaggatggtgtgttatatgtatctgggatgaataactattatcagttaggtaataacactaacgtaacacgttacaacgagtggttaaaagttccagagactgatagtgttaagttttgtagtactggttatagtcagacaatgtatcttactaacaatgggaggataatgatagctggcgaagatcctacttccagtgcgacggcggtaagtgttaaggtatggactgatataacttctagatttagtgcagttgatacaacgaagattgtttatatttcaatagaacgctttggtgtaatgatgatcatgcaagatggttcagtatgggcgtgtggagttgataatactggttggagtgggcagggaagtaaaactgttggtttctttactttcagacaaatatacaccggaagtgcaggaagtgcagttgcttgtactgctggtactggtactgcgagaattctgttagctaatggaacaatcttgtccgctggtactaatacatatcatcaatgtaatgctagtactgatccggctgttctaacattcactgaatcattccctggggttgatccttcattgatatatcaaatcaagatgtgtaataacaactgtattatatttttgagtgataagagatattacggtactggctggggaagttttggtgcattgggtgatggtgatattacgggttcgaataataaattctatgcaggtacattgtcagttgctcctaaaaacatgcgtgcttatatgtcgtatctatgtagttcttctggggattctagtatgtacataggcgatgataatttcatatacacctgcggttatcgtgggaggaacttaataaatgccactacagatattggtacgttcacgaaatgcattcaaagtgcacaaggatacaagaatggacttatatatagtgggaattattgtgctgtagtttttgatccagatttgggttcaggaatgtcatatgcggtttcatcaccaaaattgaattctccagcaccacaggctagtgttccagcattgggtatgagttcgttacaatctatcattttaccataaatgataccagtactgaaatatgtgctggtattttttttgtaaatacattataattattatatggagattttagttatgttaccttttgttagaatgtttaattatgggaatacagtggttgctcccactggtataaaggatttccaagcaaatggaagccactgtatggcactaacatatagtggtgagatgtgggcttatggtacaagtacaagtggatcaatgggaaccggattcacggtgggtgctgctgataagggttggtacaagtctaacattagtaatgttaaatcattcagttctaatatgcagactagcacagtggctttgacaaatgatgatagagtgctagtttgtggctcaactagatttgacaaattcagtactccagatattgcatcatctaaccttgattggttggatgttactgatcatattccacaggaagttattgatgctgggatgaagcaagttattaaccacgcatattatgttgccatttttactgaaaacaatctattatatagtgtggcattatctttgggtaatactagtactataatagatagaacatggcgaagaaatacatttggtgatatacaagttgaacgtgttgtttcgttgacacaaaccccaagtggtcctttgtgtatagttcaagatgcagacggataccagtatggtattggatataatggtaataagattattgataatacttccactaattcatattctgtatataccaaaatgggtacacttccttacaatgaatttgccatatcgaatagcgggaaattcagttcagcggtattatcagatgggagaagtgtttatagtggtacatttccaaagtcattcaataatagttttggttcatttttgaaagttggtgcggtatcagatactgtgtttggtttagatgcaaaaaatatgcgtggtcaatatggtcaaaatcaattaccaattgcgtcggctgataacaatgcaagtaatggcgttgtgaaccttcgtaatgttccagcgggaacacaaacgaaagacattcgatttatatgcggaaatgatgtaaagaacgtttatatcatatacacaaatgaagacggcattagctcattttatggattgggaccaaactttgatcaaaattcctcagcatatgcacaattcgtcaaagtggatttgccaggggcattattaaattaaggagagaaatatgttaccttttgcacgaatggttaagtacggtaatattgcaccaggaccagaaccaatagagttctcaaatgttttacaacaacattatacaaactgtatgtatctacatagcccaactaatactttatatggttatggtagtaataacttttatcaatttggtcttgggaattcagcagcagttgcgtcatttacagtacttgcaacgcgatgtgcagccttttggcttggtgttcaaggttcattgatgattgatttggataataaaatatactacactgggtcggttggtgcattttctgattatggagatgcaacacctgttaatggttatttgagaacatggactgatgttactgcttcatttaataaaataggtgttatggctaatatgatcaagagtgtatatataggtgaaagtactagaatattattaaccgatggtagagtaattgcgtgtggaagaaatactaatggtgaatgtggctctggtaataaaaattccatccctacactcacagttatgactaatatgggtgaagttacacatatggcatgttcattacaaggaacgcactatatcaaatcaaataaagatgcatggttttgtggtaaggataactttggtgaaagtggttgtggtggtagttctgttgtatatttgaacaaattcgtgattagtaatgtagaacatattagtactacatacgatgttacttggtggtttactactggtgggcctgtatattatagcggggctaacagtactggacaagctggtaatggtacgactacatcggtaaatcagctaacaccaattaggaacacatcggtcacggttgatgtaagtaagtacagtacttttatttgtccaagtaatatgggaaatgcatcaattggtgcacctatggcacaatacgcaccatatgttagaagtagtggtgctaactcatatggtcaagaaggtaatggaactaatacattagttagaacttggaatatttttaatcttagtgcaataagtggtggttatgacaatgttcttatggcatctaaagattggagcagaaccataataattactaaagattataaattatatgcatgtggtggctggaatggaaatggtggtagattgccagatggcacttatagtattactacactaacattaatgccaacgcagttatggcaacaataggagggaatatgttaccttttggaagaatgattaggtatggaaatattgtccctggtcctaaaaaaataattaaagttggtgcttctacccaaggccaattcttattgactgattcacatgatttatattacataggtagaaatcaaggtggtgaatctggaaatggtaataccaacacggtgtcttcgtggacattagtaagtgcagatgtttctaattttttcactggaggacgaacacttgttattattaaaaatgacaatacaatatggacatcaggtgaaacatattggttcacatcatcaacaacaacttcttacagtactgtattagttgatagaaccagttggtttaccaatgccataccagtaagtgaaattgctaatattgtatgctcaaatggtgtaatatttgtacttagttctagttcagtactatatggtgcaggatataatggataccgtggtgcattgggtattggttcatcatcaatttatacattaactcaatgtgctacgaacgttcgtaaagtaatgaccaatgcgaatgatagtatgtatcttacattagataataagctatatagttctggatggaatagtagtgggcagcatggtacggggaaccaaacacaaattaacacttggggattgcgtagttctggtgtaatcgatgcagccattggtggtaatgcattaaattactataatggtacatcatatttcgtatgtggtcaaactccaaactttcttagttcaggtacgactacattccgtgcagttcctgtaagtactttgcctaatagttctccgttgtttatgacgaattcacctgcattaaacactgctacacaaatggtaatcactagtacatatcagaagggtgttggggcgaaccgtggtttgggattaaacaattctcaaactggtgcaatatatagtgctgctaatttacaattacctgtagaagttagtgagattagtgatgttgcttttagtgacggattaacatcattattaaccaaagacgggaatgtatatagtactggatcgtattacgccattccaggtgcaagtgcagatgttgcagtctttactaaaattgatttaccaaaataacataatgccagtacttgatactggcattcttttttgtattaaatatagtataatgaataaaggagggaaatatgttaccttttgcaagaatgatgaattatgggaatattgtcccagtaccacttcaaattaagaaaataatcccaactgatttagatgttgtggttctgtatacggatggtcaactatatgcacgtgggaataatagttttgggaaattcggtagaggaaacaacactgcattaaaatcatggacattaattagagaaaacgttaacgattgctggcttacacaaggaactttattagtaaaagacaatgactcaaattattattactgtggatatggtagtcatattggtttatcaactagtactactacgtttttaagttataaccaatatattcaaaatttgtacacacaaagttcaagtacttcaattaaacagatgtatggaggtactacgtggtttactttcttaatggacaataatacaatatggagtacagggtggaacagtgctagacaattcgccgatggaacgggaactacttatgaaataaccgatggttcatttgtaaaagcggtcacacctaatgttgatattgcacaaatacagtcaacaaataactgtgtattgttgtttgataaacaaaataatttatatattggtggtgttacatccggtataagttccgcgactacatggacttcatataatcaatatactttatatcaaccaaatacaacatacacaaaaacgttacaatacacaggatgctcaactggtgcagtaagtgctttagttgaaaatccaaatacaggagcacgtcagttccttgtcggtgggttagctaataatggggcatggggaaataacactacatctagctctgttaatggagttttaggaaataacagtacgacgttaccacccggtactttgtattcaattcatactggatacccaccacaatctagtatactagttacgagtactggtgtatatgcaactggtttaaatgccagtagttatgctggttcattgggtattggtactagtgcaactgttggtaagtttactgcatgtccaatgcctacacaaataacatattctatgtatgataaaataaaaatatatagaggttcatatcgtacatttctaactgatatgaaaaatatatattcaaccggaacttatgatgatggtggtcctcgtacaactagatatgtactagatacaccccgacaattataatataatagccagtactcagtactggcttttcttttgtattaaatatagtataacaaataaaggagggaattatgttaccttttggaagaatgatgaattatgggaatattgccctggcaaagatactgttgttaaaattaatagtgatgaaaattcaataagcgtattatacagtgatgggtcattatatatgcgtggacggaaaccaatcagcaaaaatgggagttactggttcatcttttttgaatagatgggttttatgtccttatagtgttgatgatttctggagttctttatattgtactataattagaacaaaacaaggggaattgtactatagtggaactaactcagtttttggtatatcatcttctgtttcaacatggactcgttgtgaatcatattttggatctatttctccgagttcaataaaagatataaaaataacatcatcaaccagtactaacaattccatgttaatactaacaagtgacggtcagttatatggtataggcatgaatggtgcaagtgaattgggtacagcaactacaccaattacatctccactcttaatagacactagtgtatctgcaattgcatctagtgaaatgagcagaaactttcactatataaaagatggtatatattatcgttgtggtgagaatactttttatcaattaggaaccggtgataataatcctattactacttttactgcattgaatcttggtagttctcatgtaattgcagtacaagctacacgatgggtaacacgtttgattgttcaaagtagtacatctgctttgtctttaatggcggctggttggaacacacagttgactataggtggttctgaaaatactgctataataaggtcatcatttactacaaatccctataccgatataacagcaaattcattcgataaactttcaccagtatcctatgttaatgcaataaaatccagtactaacattattaatacgaatggtaagggatataattctaatggtgctggattaggccgcaacgcattctctgggaattatggttcaatattaccaatagaattctttgatgatagtgttgacttggcacaggttgagtggtttggttcaattggtaatggttcagtatcggtagttagtataggtgaggatttatactggactggaaaccctgggtattttactgaacaaggtgagactagatatatatataaattcaaaaagtgcgttccttttagataaacacaatgccagtacagagtactggctttcttatttgtattaaatatagtataatgaataaggagggaattatgttaccttttgcaagaatgattcagtacgggaatattaaacctgttcctgtaacaccaacgataaaagattttaagattggtttttcccatgaagtgttattggacagtgcaggtgatgtgtggggtattggatataataccgctggtcagttgggatttctggatgctaacacaaattcaataggaatgtggtctaagatatatgagaatgttagattaattggcgttactgccaattatacagttgtagttacaaataataatagaatactttacgctggaaataacttaatttctaatactacaacgtttgggtggaacgatataacgtctagtatgggagcggttgtagtggatagcatcgatgcattatattgcacagatggcatgatgcatattaaaactgctgatggttctttatacgcatatggacgtaatatgaacgcaaacgctggagttactggcgtttctggagttattagtgttgcaactaaagttagtggtttaccatcggctgtgaaagatatacgatatacgtttagttatggtacagtactatgtcaattagataccacctcggtatatggatggggaagaaatgtcaatggtgaattaggtcaggggaacgcagccgcagttcctaccccatcccaaagggcgggtgcttctattgctataggtacttcgtataatgctactgcaattgtttccggtactgcatcgttggttacatgtggtggacaaaatgatggtcagttaggtaatggtattactactgctggtaatgtatacacatatggtgctagagcatacccaagcgatcttaataatataagaagtccagtggattgcagtacaacttatacatctgcatttatgagtccagatggcatatattacacgggttcgaaccgaagtgtgtttggtggtccgagcgggactgccacggttgcagtatataccaaatgtagtgatttaccaatattatattctaatataacacagtggtgtagtggtactattggtggtgcgatatgtagcagtactgaattatatcagtgtgggaccggtagatacattgccggagatgggcagaacgcaactaggtatgggtttagaaagacaccattaccttgggatgcttattgacattatgccagtactctgtactggctttcttatttgtattaaatatagtataatgaataaaggaggaatttatgttaccttttgtaagaatgttggattatggaaataaagttttaccatatattcccaattttgttaaattagttaccccgtcatgtggttattcatatacatgcacgatgatgcttgacaaaaatggttcaatatgggctattggtcttcagaatggtggaatttttggtttaggtcatactaatcaagtaactgaatggacacaaatatacagcaatgttaaagatttttggtgcagtacaatgaactctttttgtctaatacgcacaaatgatgatagattcttttatagtggtttagataaatggctaggtaataacacaacaaatacagtgacaacattcactgaatgtacaagctatttcgcacaatttggtatttcaaaaattaaagagatatacgtgggttatgattatgctttgattttagatacagataatagtttatatttgttaggtgataatactggtgctaagtttggaataaacactgcatcatattataataaatttacatttttagtggataatgttaaaaaattctgttcatcgataacgccagctaactggattattaaacttgatgatacaatgtggcgtacaggaacaacaacttccggtactttgggaaatagtaagcaacaaacgtatgtattcccttgggttcaatataagggtacacctattacagaagcaatagatattttttgtagttcgaattatattggtattataacaaaaggtacaccagaatcatgtccaatgtacactctaggctttcaaggttatggtcaattgggtaataataatgtaacatctgcttataagttaaacccagtactatcaactacagttccagatgatagtgaattcattcgaatagaaaacactagtactcgtggactcgtatattatagttcaggtaaaatttatagtactggttataataacaatggtcaattggcaaataatactacaagagaatcaggttcatttgttgaagcaattttacctagtggtgttcaatttaagaaaagtgaatcactagttgcaggaaatgatgcaacattgtatatgttcattaataataaattatactacgcagggaaatcaccagataatgtatctgcaagcagttcatctgttatgaaagaattcctacttcctacaatttgattattttaaatgccagtacagagtgctggcttttctttttgattaaatatagtataatgaataaaggagggatttatgttaccttttccaaggatgataaaatacgcaaataaaatgaaagttcctgaagtgaaagaaatctttatttacaatggttatagtgcgtcagttattccagcaacagcactcttactattatataaaaatggagacttaatgggtataggtggaactagttcacaaaactatggattcggaaatggtgtacctaatgcgaaagtaaaagagtgggctttaatataccaaaatgtaaaacgttttagaacagcccaaggttcttttaatttaatccaaaccgaagataataaattttattacagtggcgtaggtagagctattggtacaggattaagtactgtcagtacttatactgattgtacttcatattttacatcagtattcaatgcaacacaattgtcgcaaattaaggacattcaaattgtaggggagggtatttttgttttacttcaaaatggtacgctatatggaatgggggccaatacacagggatattttggtaataacacaaccacaagattatcaacatttacttcaattaatacgaatgtggatagtgtaaaaacaggttcaagtgcagtgattgtgcagaaaattgataaaacactttgggtcactggtcaaaacacatggggttcacttggtataagtaatggtgaaactaacgttaaagtatggacacaaatgggtgcattagccaacaatactgttatacattatgaacttggtgggagtgcatcatgggttgtatctaaacacaacacgaataatacatatacagttcgtgcaagtgggattcaatcggaaggtaacttgggtaatggttcagccgcttcatcagggacagtattatctacaatctccactctaccaatatcagataatatggaaatgaaatcaaattcattaacatatggtgggcttacggttaaaactaacaattcactttatatgtgtggtataaacacatatggtaggctcggtcgcggtaataccacatcaagtactacatttgtagttccagttgatgcacctaaagttggcagcatcgagttattctgtccaagtgaatgtacaaatgtgtatatggataatcaaggggatgtttatttgagtggctatatcccacaagcgacaggtacaacagtttctgattactacactaaattcaaattatatcaaatacccagtcgtggtatataaaaaaaatgccagtacaaaatactggcatttttttgtcctaaatataataacgatttacatttggaggatacaatgctaccctttggaagaattatcacatcatcaaaaaagaacatacaaccttctgttacaaaaatagcttcatctgatacaacagtttttgcccttatgtcagatggtacgttgtacagtagaggctctcaagagtttgggcaaatgggtataggtaatattataacacaaaccaaatgggttttgtgcaatacaaacgtagaagatctatgggttcgggtatgagtcaacattaattaaaaagaaagataatacgatgtggtatgctggaaatggtgcatcattcggtttatcaactgataagtcaacaacgtgggcttctgcaaagatagtgtttgatagaataacagcacttggaaaaacaataaaacaaattgcagttagtgcaggtgcattaagcatattatgtacagacaacacgatatggaatacgggttatggtagttatggacaactgggaaatggtagaagtaccgattcactttcatcatttgtacaaggaacagtacctactggagtaacaccatccaaaatactggcaaattttcttatgcaaggatttattggaaccgatgggagattgtattatactggtgcaatatcaggcgtaggtacaaccgacatgacgttatattcaaagtacacgttatgttctcaaataactaatacctatacggtgaaagattatacaacaaactcaagttacttcgcttttgctatagcaagtaataatagtagtaataaattatttgcatatcatggtggtggacaatactttggtcagttagcaaatggttctacatcacaaacatatatttcgttaagacaaacaacacaagcaccaggtgatataataagaagcagtgtgggttattcatatttttctaatcatattataacttcattaggtgtttacgcaactggttataacacaggcgataacgcaggtcaattaggtataggtacacaaacagatgtctcagcctataccaaatgtgtactaccaatagagatgaatatgaataacgtatatgttacagcaactttatacagaacttacttaaccgatggtatacaaatttacagtactggacaatatgttacagacggtggagttgccagtactgtatttgtcaaagattcaccattttaggaatattgtacaaagtgtatgcggttattttagaactctttttaaattcatcgtaaagataattcaaaattttggagcattcaatatacttttcaatatctttatggattaatgagtactgaaacattaaatcagatgatatattgtaggtactaccttttaaactgtttaaaatatcacagatttcagggtttactggtacttcgtcaaaattatcatctaaaacatttatttcaaaatcaaagctatctttgtttttgattaatttgataatagaatcaccataaacattatattgttttaatggatttactacaatgttaaaaagattggatgtattacaatcaatatccataaagtatgtattatcattgtacttaatattgaaacatccgtactcaataaaatcaccaggagttattgatgagtttcttctcgtttcaacataagaagctttaattttgtttttatgtaaaagagtaataaatttcttagactgtttagcaccagctaagtaagtattataacttggtcttttaaagattataggactagacttctcgccagagaaatatttttttataaatttacgttgtttaacaaaatagtttttataaaacaaacctaattttgatttcatcataactccttatacatccagtactattaagtactggatttttattatgacatacgcttattatgaatggaattatgaatggattttaaataattatataattttatcaatccactaccagtagctacaaacagtagtgctgttggtatcatacatccaaacatggttattaattcatgtatttccataccatcactatttggtcccacatcaaatataacaaccaaaacaacacctaaaatgcttagacaataatatcccataaagaccataaaagtgatatatccggcacttgatttaatattacataacatattatacactggattaatacagaagaagtataataaccataccagtgttccagtactgaacataataattgaaataatggaaaatatctcacggtaactcatattatttcctcatacccaaacgttggtggatttcagagatctttatatacaatagtaccacaaggtgcagtactaaacaacatataattactgctaataccaatgaacatatcataagaccgaaggttattgtattcaaagaggatgtgaacagtccaattattaatacaataaaaccaaaattgaatactgtacccaacacagtatatgctggactatatctcttttggattacatcatatatatttgataatggtcgcttatggaagtacttcccaatgcacacgaatgcattcagtgagaatataaatgtatacgccattactagtaattgaccaacgaaagataattctatcccgttcatactaacctcgtttacgttttttaattgtactgtgcatcttttcgaaatagggaaccaaaacatattgaacagtttgccagataaccattagattatgcactgcaccaccaaggataccaaacactagaacaataattgccataataggatcaccgtctaccataccccatttaaagatatgtaaaatccaagcaatgactagacaaaataaactaagccaatacgtaatgaaaaatccggcttgtagttcataatcatcagcaatttcatcgtataccgtttctaaaaatgatacacaaaagaatttaccaattataaccacagtactaataaacaacatagcagttaagataataagagcaatttccattacatccctcgtttacgcttttgattgcgtctaaattctgttagtccacggctaatcggcggcagcagactacataaaaaagtaacagttgttggtagtaacatcaagtcaatcattgcagtgttatctggtggatcaaaaaccaaaaaatacacacaagaaacactaataatggttgaaccgataaaaggaatacaaaattcttttatctgtttttcaacataatcaaacatcttgagtacaaataaaaatccaacccaacacataatgaaatagaatgaatacaacgtgtaaatcaatgttactatatccattagtacctcgcatcaggaactttagcacgtaacttatgaacgactggcaacaaaaaaagtccaatatatactatagttgaaacccaatagaatacaagcactacaggttcaccattagaacgaaaccctctactaattagcgagtagtgaatagttggcataatcatagaagccaagaaccatacatgtaattttaattgcagcatgttatcagcgatgaatactgaaattggtcgtttaaagaaccacatcagaaagtagaatccagcactaataatatagtacatggtactaactttcatataccacggaagtaaatcaataaagtactccatcattcctccggtatcttatttcgaagttcaatcataacacaacaaattttaatggtcaatataaaagttaaacatatcatcccaagtgtgccgtaaactgcggaaaaagctggtagtacctttcctgtgagtgttgctacaatacatgcaatcaatgttgatgcaaacaacgattgattaatgaaagaattcataaaatcttcaccattacgcttatagaattgtcgtttaaaataccatcctagaaacataactacccaaaatgttacataacctgttagaataatccctgcaattgaatgtgcaactggactactccttaaaaactcaagataagcttcaaacattagaagtctccgcgaattttatctctaccatgaataatgagatggattaagtatacaactaaccaaatgaacaacccaaagaatacaatatattgtgagattgagttcaagtgaggattagcacaataaattaagtgtgccataagaccaacaattgcaaacaaaccttgaacaagtgtgtaaagaactagtgatgaattcctcactggatacagtttaaaaacaattttctttttaaaataccatagtactacaaccagtgcatgataaaagaaaaaaccaaaaagataaatcaaagtaatactaagcattgtatctgacttaaagaatgttaacattagaaatcccctttaattctatcacgagctttaataataaagtacatgctacacaccaacaaccacacgattagacctgaaaacacaagatattgtgtaatgtgtggtgtattatcaatttgtaacatgtaaatcgcatatgtcatcacaccaaataaaataaacccaccttggataatactatataaaactaagactacattatcatccgaatacaatttaaaaacaattttccttttaaaataccacagactaattacaattgaatgataacacaaaaatacaaacatgtaaattagcgtgataccaagcattgtatctgaattaaaaaactcaagcatatttcttctccgcagattatactcccattatagtactacacgatggtagtactgtcaacatatgtaattagattttctcaaggaacaagttttcacattgttcttcccaatcatacggattgttgttatatactgctgaaatcaacaaaggcatacgcagggatggtgcacgaagattatcttcatgttttaacatccagttcagaattgctttactaccgttactgttaacacctttagatgcaaggatattagtcttagtcattacattttcaatatgaatcatgatatcacttttagtctgaatctgtaaatccacgtacacagaacgagacataagagcagcataatgagcagacattttagttttagctttagcatctaacgctaaatctttgttagtaatgaatacgatgcgaccattaaaatcaaagctattaggaatgccgttagtgctcaagtacttagagctagtcatataagatacagtacgcttaccactatccaaaacagctttgagtaggttcataccatcttctgattcaaagatgctatccatatcatcaagtactaatacgttggtgctgtgacgattcttgtacagaacttcgtacagagcaagagtagtcatcttaccactgatagtagctacgttccattctgctgcgtcatgagccttctggagacgttgggacaaggtgtaagtcttgccaacaccaggagcaccactgacaaccatactttttacagtactgctatcgtcgagcaaacactcaagagcaaccatcatggagttgaagtttttctggatttgaatgctgcgtgcttctctggtcatttcgttatcctcatcagttgatgtgtgtattttagcaaaggtaaataacggtgtcaacacttttaactatatggacgtagaaaatgcgtagaaaaacaaacgatgaatttataaacgactgtaaaataaaaagaaaagatattgattttgattacagtaaagttaattataccagtaatagatgtaaaataatagtgatagatccactatatggtgaatttgaaataaaagcattgaactttctcattcaaaatcaaaatcacccattacgtgcacaacataatagaacaataagtaagactagaaccactgaatcattcattgaaaaagcaaaagaaaaaagaactgacattgactttgattatagtaaagtttgttatattcacaataggaaaaaagtatgtataatagatcctgattatggtgagttttatataaaaccaaacgactttttacaaggaaatggtcatccagaaaggggtggaactaggagatcaaataccgaggaattcgtgttgaaagcaaaggaaatacataagaatataaattatgattatagtaaagttaactatgttaataacaaaacaaaagtaactattattgatcctgattttggtgaattttatataataccaaatagttttttgaggggccgtggtcatccaagtcgcggaaatcattgtcaaatttatgcatatatacataccataaaagaagacaataatataattggattaaaatacggtatagaaaatattcaaggatcacgcttcaaagaacaaaacgcagcaagtatatataacattgaacatttatattcatataaatttgaaacgtccagtgattgtcgaaatgcagaaagtgaatgtaaaaagttatttggtaaaggtattattctaaaagaaaatatgaaagacggatatacaaaaactacatcagtggataatataaattctattattaagatatacgaaaaatggggtggaaaaaagggctgacagaagtcaacccttttgttttaaaataaatcaatctcttctatatatgaaccacaacgatgctgagatataaattcattgacaatatgtagaagttttgataaatcttcacctcttatagtttcagaaaatccgttagcatataatgatttagatagtacgccaacctcaattgatgattcttttttgatatacctctcaagttcttgtatcaatttaccatcgttggagaaaaacgatttatattttgttgtttgtaatacattatttttatatgcttggaaacgtttatcaatatttttactaattccaaatttataaaatttcttatctgaaattctcgaagttatttcatgaatatagaaatatcccggcagctttggattgtatccagtcgcggtacatcttggacaaccagcaccacttaaatggtttgatggtattatagtaaagtcaccgtgtgtatgacaagttacaatcacatgtgtttgactatgaatatagtttgtatgtttataactatacttgttatcatgctttaaattagatttttcaataaacatatcattagtaaatttacttttatcaattgaacataaacgacaaccttgttttcctgttttatgtcctgctgctaatatagtaaagtccccatgtacaggacaagtcactgttattttgtttctactagtagtgtatttggttttactataatcataaaaattattatgaataatagatacttccttaatatattcatcatgtgaagatgatctttttatatttttactttcaataccacatcgtttacatccatgaccttttaaatgattttttattttttgttcaaaattaccatgctcattacaggtaattgttatattttcatcagtgcaatatgattctttagttaaaatatatgaatatttgttatttgaaatatttttcaatttttttaataaatcatttttttcaattttaaattgttcacttctttttctaaagaacatttattacacccataaccgcttttatgtgattttgataaaattaaaaagtctccatgtacaggacaagtcactgttattttgtttctactagtagtgtatttggttttactataatcataaaaattattatgaataatagatacttccttaatatattcatcatgtgaagatgatctttttatatttttactttcaataccacatcgtttacatccatgattttggtaatgtgacaatgctttttgttcaaaatccccatgtattggacatgtaataatgattttttctgcctgtttagtgtataaagttttactataatcataaaaattattatgaatctcagatacatgtttgatatattcatcatgtgttaatgattttttatctttaccacattcattacaccctgcaccttgtaaatgactaaatattgtttgggaaaagatgccatgctttttacaaattatatcaactttaattttactattttcgtattcagtaattaaactataatcatattcatcaccatgaatatttttggcacgttggattatatccattaaagttaatttagctggcattacttaaaacccctttccagtactgaacccgtccagcaccattaatcttagcctgaatcttatctttttcgacaagaccttctttgaaatcgatggaagtattatcacacttaattacatctaagtcaagtacttcttgtgtacttaatgaagtattgtctgcaatttgttgtaaagtaataatatcagtaccgaagaattctgctaaacgtataaaagatagtttcatgtattacctctcgtttcgataaaataattatagcaaaaagggctgaccgaagtcaaccctttatgttattctaactcactcattgtggtgatagttaatccaatttcttctgcaatcctgcataaaagaccaacagcattacgaagaatatcagtgttgtccaccgagaatgatgagttttcatttacagttgaagactcaatgtagtactcaaaataacgagaagttgaacgcacaactttaacaccttcatacttctgtagttcagagttgatacgctcgattagtgaatcttccagtactcgatagtcaccattcattccacgtttccatccatcagcaggacggaaataaaaagtttttgtacgttgaattgttgagattgttagtgggttgtattctgcgatttcacttaaagatgccatgttgtattcctcatttggtgatgtacataatacagaaagatagaacaggtgtcaatgtttatatctcaaatatccaaatactttggtgtagcacatactacatcaactaatcctcactgaagacaacaataaggaaggacacgaacaatgccgcgtaacaaggagctatcttcatgtaccacggaacttcataataccatgtacccaattcatcccacgaaaagattatactcataccgaagccgattagcgaaagtacaatgaaagaaatccagaaacgctttgaatatactaataacatgttatgttcctttgtgtgaccgaagtcaatcctttcctttaataattattcatttcatctttgatttgttcttcaatttcgtcgaacatatcagtactagattctatattactacttacgtcctgcatatctttaacgtactgtgggcgttcaacgtcagtaaatttataccacgtaggcttcatctgtagcttctcaatcaaacgctcacgagacattttaatctctgactccgatggtacgtagtcattacaaaactccaccgggaagctgctaatgtcatttacttcaatgttttgaatcttcataccacgacgcaaacattcgttaacaatatcaatatgacgcttctgcaagtacaataacttgttatagaagaatgttacatgacctgaacctaacaggtaagtactgttaattttgaaatcacgtacacgcttacgtgcttgaacatgtttttgtacagcaccaaacacacgtggaagttcacgatattcagccatcagatgttggtcagcaagttctttaacgtgtactaagttaatgcgtgtcatgtattcatcctctcgtttcgatgaaatgattatagaaaaaagggctgactgaagtcaatccttttctttattatacaatgcgtacatattaatctccataatcaagcttaactaacttaccattcaaatatccaaagttttctggcttcgcatctgaatagaagaagtcagtacttaactctgaattcaatgctaaagcacacaactccacccaaaataaacccctatgttgaactggcttacaacgtttctgtacagttactagtccagtacatgatgaccacaaagtaggacagataccagtatcactacgattggagtactgcatccacgaacgttcattgaggttagctatcatccctgttaagaatagcttccaacttttaaaggttggaatcttgatagcatattccccaatgaggataacagttcgtgttgcacctttaaaatctatattcatatttttttaattagaagaacacaaaccaagtccagaataaattccacactacaaataaagacatagtggttttatgtacaatatcagcagtactggtccatcctccaccgtgtcctattccatttatgaatagaactaagaacaagataccatttaccaccatagtacatagtaagtacacaaacacattccatgcaagttcaggggatactaacgtaaatggtaaaacaattagtagtattagaactaataaaattttcatttatcgcctcacttaattaacgtgacaattagtacgaatcagattcccagtactcgattgcttctttcagcaattctttagcacgttgttttgcaatgcgagcgggaaactgatatgtgtacattaactgacgcttcacttcattcagtgaaagctgttcatggtacagtgcatccatcagtcgattacgagtacgtagtttcatataagttatccttatttcaaagaatcatagtaagcagtgtcaaagattggagtcataataacatagtcaatacggtcaatgtaagttgaactccacatttctggtttgtcatataactgacgctcgcgttcattcatacgagtcagtacttcttccaatttactacgtgaatccatcaatgtattactcgaaccataagtgaagtactcagtccaatgatattcatattcagtactgatagattgaatagtaccatctttgaaatgagctaaggcataacctttctctacaaagttatcaggtggaagaacaccatctggattagttttcaatgcttgtgctaacttttctttaatttcagttaacgtgcatactgaacgaatgttcttcaggtttgatacttgaaaatcactgtactttccaaagaaaaagacacgccaatctttaggttcattatcagatacggtagcatcagggtgatgggcgagtaaacgaagaaggccagctttatgaccgttaatgtagatttcatggatgtggttagcagttttcttaaaagtaatcatggtagttcctcgattgtagggatgagaagttcatccccttgataagcattatacagtactgaatgtgtttgtcaactcaaaataaattcatttcatgtgcgtattgtggttcaagataagataagtttttgaaactgtctttcaattccgcatcatctacgtacacagtaccaggtacattccccatagtgaagccaacccaaacagtcatgtttccagttcctaagcggggcattgatagcgtcccatcaggtgaaacatcaaacgctacactaaagtcatccgttacaacttccgaaccattttccagaataatacaaccacgttctttaagcttctgaatgtggatagcagcctctacagcacgtttaaagttatagtaagactctttatcctcaaacatagattgtttaaccagacgcttgtttagctcggttactttgtacatttgtcgcattatttcaacacccatagtggtaggatttcatatgaacctggaggtgctggattgataatctcagggtattcagtactgttaggattaccaccagcattgaactcagcaagtaataattcgagttcattcctatcatgtacaacaaacacgcaatatccagttccttcttcaagaactgtagttgaccccgcacaatcccatacggtatcaatacataataattctttagtgtttttattacgcaacgcaaacatatatgtctcctatctattcggcatattctttcgtagtcgcaagagaaattcaaccactgaccatgttgtaatgaaggcaatataagttgcaaggaatccagtaagaataaatgcaaccagcgtactaccatttggggaatcagttttaatgccgatgactccatcggctacagtgaaacatgtagccattaatgtgtaacctacgtacaacacaaagaaaaactcattctccattgaaggatagaaacggttaaacactttataaaatttaaagtacagtaggattataccaacaaaggcatagaatgtaaacagtgttgttataatatatgagattaggttcaaattatacatatcaacgctccggtagattatcacgtaatgttttaattcgatgatacattttcataccaatattaccaaagataccatatccaagtactaaaatgtatgcaataagcatagtaataattactatagtaccaaaactataatgtacactactgatacccattgtagtttcaacgattatttgagaaactgaaagaatcaaaagtacaactacaattggatgatttgggtacattcggttgaacaacgttttgtacttaaagaagcacagtactccaccgaataagaagtaaacaatgtaaatgcaagcaacagcataggcaaacatgttagtgtaataaatcattacaaatccttacttttcagggatattagaacgccatatatcaatgcgatgaactagtccaaagaacaaccatactggaacggcagctatcataacaacaaatgaaaacccagtcaagaccgataccagatttaattcatcagtactatacccacatatcagtacttctaatattccccacgtacatgcacaaaacatcaagaatgaaattggggcatcatagtagatacgttcatataaagtagtgtatcggaagaatgcaataatgtagcaaaacatataatacacccaaaccaaagatactacataaaatgatactttgtttattaattcaaaatattgttccatttttaccccaatatatattcagagagtaatgtattagcttcatctttgttcttaaggtaatacatgtaatatagattcggttcaccatctttagcactcaaatcgaagtactttaaactatgtactttcatagtaaaaacaaataatgacttaaaaccaatctcaccgtacttaataaacagttcatccaaatgaatgtaactttttgatttggataattctttaacgtctgcatcaatttcagataaaagatgcttacctattaagttttcaaatgaacgcatgattttatcctttaccgcaatttttatggtttattaagaatacatcagaacatcagttctgtcaataaaaaactggatcttcttcagtaattggtatttctctacgcacatcacacgaaagaggatcagtaatgaatacattcccatctttatccatcatcacattacttgaatgaatgtctggtacaaaacgcccgtgaaactctttcatgatgttagcagcgaccgttgcaatagcaatctcttcagaatttccacgcatatcattcactgaagttgcgtactgaccagcatgtgcatacgaatacaaatctccaattttagtactaacaaagtcatcataattatttttttgtttaattataggatagtacttgtccatctcataccatccaaagtttccttgttcgttggcactgtagatcactggaagaaacttggttcctgcgttttcaatgcagtactttgcataagcacgaaaaccatcccagcgtgaagtggttactttaaatgctcgtccaggatagtttttatgttcaactactacagagtacatccccattccaagcaaagtaagtccagcagctttaacttgtggaaagattacgcgttcagcataaggaatatcaaactccatcgcacaacgagtttttgatggacgcaaaatgtcaattaaagttttgaatatttcttgcttagtcattactttatcctctgtagttaatatcaacatcataacaaaaaaggctgaccgaagtcaacctttagttttatcatttaccgtatttgctcatgatgtccttttcccaatgagttacgttaccgttatcgtaatctttaaaggaattatcaagagtagttaatgcatattcgtatgcttcaggtgattcaatgtcaacatcatcagcaccatttactaaatcagtccatgctttttgtagtttacgagcatttttaccaacattacttttaatccaactaatgtttttgttgatactcttattatcagcaccagcttttttaccaatatcggatatccacatcattagcttttggagttcatgaatggagttgtcgttcatttcacgatctttagccaattctgcttccatgccatcagtatcagtaccatctttagaacctacatcaattccatgtttagctaatagtttaccaagttcaaagaatgctgcctcagcagggaagtcataacctttgtctttgtagttgttccatgcactatcaaactcatctacaaatcggttggcataatctggattgtccacgagagctttgtacactgccattgcatgttcaaatccttctttgtcagaaccaaactctcccatttctggacgatgaatgtaaccatccatatcaacggtatcaggtagatcttcttgctcaggctcaacatctttctgttcaactgcaccttcttcatctttacgtagtagatatccatcaggtgtcactttctcaccatgttcggcttcatactttttcatagtgttgaatgcagcatccatagctgttacgaagcgacttttctcaccttgtacataagatttaagtgcactgttaactgcatctgatacgagcttaaccttatcgtctttaccttctaaacggttttcaagtttagccagtacattcttgacttgctgggcattagcacggtctgctttaccaatactatcaaaagttttaagaataccatcaagacttgcttcaccctgttcaggttctttggaatcttctttgtgtgtaccttcaagtgcacgcatgatagtactgaatacttcagtaggttcagtgctcttattacctttcattgcatcaagtacagcttgtgctttacctttgagttcttctttaggaactgcctgtagtgctttgacaataccctgaatcaactgtggtttgttagcaaagatcttacctaagttatcagataactctttaacagggttagcagctttaggagcttctggttttggttcttctttaggaactgcttgttctttctcagcacgttccatatcagcaaggcgttgtttctgtgttgcgttaagaagacctaatgagttaacataacgtagcttttctagctcagtcatgttctcagtactcttaacttcacctgcttctgcgtttgccttaccagcaagtcccgttccttggtttctggaaccacgtgaaccttgtcctgcttgataactatttttgcgacgatttcggtcggcccatttatccgagtgttgtactagtccaccattacgatgtttcatatccccattatcttgtggcatatttttaatcctctatccatgtttgattgtataaaatacgacgtattgtttttttacatacacggtatttattacaattttctcgtgcatattctatcacatcattataattatcattataattatcattataatcttttcttatttctcttacaatttcccatgtcaacacagcagcaccacgattagttgttgcgttaccatgtgaataagaatatagtacgttttcagatgctgtgttccattccaaattcaaatagtgattgttacttctattacaatctttatggtttatgtgaacaacttttttctttgttctactcgcccactgtaactgtttctgtgtgggtggtggtaaaaatgcttcagctactagtcgatgaatcgcctttctatttttcacagaattgcgatacaaatcgaccttcacatacccatctttatttttaaatccacaacttatatatccagtttgttcgtttcttactcttccatgatcagaaattgaatagtcataatcaggaattaatttccaacgttccatgtttatttcttccattatatataaaggttgaccgaagtcaaccctattttcactgtactataccattagtagttacagtcagctttcgctgtgaatgttttactttctccgcgttgtgtggtgattcgtccgagtaaagtagttttgtcaatagtcattgtagttagtactggaacattaccttcaaagtcaatagctttgaaattgtaggtggtttcattctccactacacttggaccaaagagttcatatgtgttgatttcaagtgtgtcaccatctgaacgcaacagtgtgcagtccagattaggagtagccagtacagggaaagccaaacacattatcattgctataattaatttcatttcacttctcctgattttttcttaggatcaaccaatgaccaaatgaagaatccgagaattacaagtacccacagaatcatgataaagaaagcaaacagtacaatagtatttgtcaaaaagaaatacaatagaatgttcgacccaatactacatacaatcaatgcagcttcatgtttaacaacacgaatggctgtaatgagtgcgggaagaaatccgacaaataacagtactaacgcatatagtgataatgtttcagccatgatatcccttatttggtttgttcaacactaggtgtattgatataggtgtcaattgaataacatactgtacccactacaacagcagcgattagggcagcgatgatgaatttagtaccttgcataatttaatacctcacgttgtttgtattttgtatcacttgatgaaaatattatacgacaaagggctgactgaagtcaaccccttttaattattttttaaacttatgtttttcgccttcaatagagttcacgatgtcatcatgaatcttgcgaaggttatgagttttctttagtgcttcatgtagtgcacggaatgctgcgtgtactgttgccttgaagtgctctttaggagtcactttaagtttctcaatgatatcacgtacataaattggatgatcttcaaagacacgattcaattcatggcctatccttaaagagataaattactttaatatttatacttcatgtgctgtttatttccacagacacttaagattatatcacatatgaaatggttgttccaaagtcaaatcagtactgtttaagttctgaactgaagataaaggaatccatatcttctagtgttaacttcaagtccggtgtgtactttaatatcacacattcaggtttcttaatggcagcttgataggcagcaattgccaactgttgaagctgctctggtgtgtagttcatgcgttctgcattgaatacgatgttcttaatatcaccaccaggtagcttttcaaactcacgcataacagcagccatcacatcatcagatgtattcttataagcccaatgaggtagttgcataacgtcataaatctcgccattgtcgttcataagagatccattttttaccgtccgatgaactaaacagacgacctttaatagcaatgttctctaccaaattaacaaaggcaaatatgtcttgctcatttagttcaatgctattaacgttaatccaacccatactacatctccagttataaatcacgaacgacattcattaaacacaatttgggctttatcgcattcaaaacccatatgcattctttgtaagttgctattatagcatctaaatgctcagttacaatgctttcttgaaaatattcttcttcattgagctttgctaaattagtcacatcacatgtaggtactataggtctggattgtacacccattccattattgatattggtaaaatgtaaaaaattgtacttcaccacaccgttatctacacttatgatacatgtcaaatgttccaactcagttagttcggtattacaagtgacatgaatgaatccagcattataggctctataatcatctactaatatctcaaaatcattacgtttaaatataagtgaaatgagtttgtcttgtggtttaaccttttgaaattttaccgaatttacgtatgatactttaatcttagatgaaattatctttttactaagtgcagttaattcttctttagccttaaaagttaaagttataggtctaaatctagaacttttgttcttctttgatactttaaaacgacctttacgattcataatttcctcaattaataatttcacatttaacgtgtggtttatatagcataattaacccatttttaagtacaatgattgttgctctgttagtaatcgaaacgtttttaattatactttttttatatgtttcaacatatttctcttcataatttatacatttaacatattctttttgtttagcacttacaacagtactgaataatatcagtacaagtactatatatttcattactataccttataaacaaaaaggaattcatttaagaattcctattttacaatcatttatctaacataccattgtgcaaacgttcatatacttcagttcgacgcaaattcacaatatcttctgcgtattttaatgtaaatgcccatgcttttggatgtacgttaagcttcatacgaattcgatttttcatcaactctccacttaaacgaataaattcgtgtacaccacgactaccgtattcagtaattaaatcattaatgtacatatcacgaagagtttcatctgcacattctttaaccatttctacgtcagcgacgatgctttcattaactgaagtactgatcattttaatttaccttatttaaattcgactgtaattttatcaccttcaactacgaacttacagttgtaacgacgtgccatatccatgtacatatgctcagagtaccagggaacatcaataatcggatgctctgcgtattgtagaacttcacggtcgccaactgtagtgatgacgaaaggaatgttcatctctcgtaaaaacagttcagcaccaggagaacgattaataaattcagtatcattacgtaaagtaaatccattatattgtaatttaagcttcatatgttatcctcttttcaataccattctttaaaaccattaagttcggctatgtgagtaattataacacatataacattcaggtcaagtataatttgatcataatttaattttatacgatcatcattatatgccctaaagactacatcgtaatcaaagaaatttgcgttttcatcattcattgaaacgattcggtatctacgtcttccatctgtattgaatatagttaaacactgttgaaactttctcattaactgtttagataggatattataatattcaatatctttttgtgaattacgtgggtcatcaggaagatagaatgaaacaaatttctttaattctatttgagttttatccatatattacctcatttgtttctcttttactttgtcggaactcatcctttgcttccttaactgacatgatacgaactaatttagcactaccgcaatagtactgaacctgattacgaccaatgtctacatggtggtctggaacttcatatacagatatagcaaacccagcacgatgcaatttacctaagtccatagtgaagaatctgaacaaatctttcaaactttgacagccaaatacccatccacttttgattgaatagatcccatcctcagttggttcaggttggaattgagaaggtgtagtcatgagcaaacggtcaaatccatttttagtactgtatctggttgaataccgtgcaaacggacctacagttcgtgcaggatctaagttaggttcaatgtaactaaatttaagttcaaaacgatatacatacataattaaaatcctctaatttattaagagaattataacaaaaaaggctgaccgaagtcaacctttgttttgaagttcttgaactaattgtcgtacttcgttaatatttttacactgctttacagtgaagtaatcatacttacgaccataggttcttgggtcatcaccttccatatactgctgcacatcaaagatttgtaagtagggatgctgcataacacgaatattatcaccttgataaatcaacataatatcaatccttatatttacacaagccaccaaaactagtttctttagcaccacgacgcatcataactaatttagcatattgtgtaccattactatcttcatacacatctacttcaataaacgctaagaagttaggatctgtatcgttggaaaactcagtgaagctaatgtcgcctactgtatgctctttaacaaacgtatatgattgtccatcaatatatacaatatctctatcgtcactatcaccttgatagatatgtttaatattaccatctgtacaaactaaaccttctaatggttcagcatatgacaacccacacattaacatacatacaaaaaataaaatagttttcatgattattttcctccaacgttaagtgatttcttgtgctgatattctttataagtactataccatatatcactaacgtaaatcaagtaccacgtagcaggataaagtgccaatccagtactgatgtatacgaacttttggtcaaggacatcaaatacatgcagaaggaaagttactcccataatgcaagaacaaattaaccataagttataagccattgaatcgcaagcaaaaatagaatcaagcttagaaattaggacatatttgtttgttaaaataaaatgaattactgcaactaaacaatatcctgccataaaaatagaaattaaaaaagacagaataattggaatattcaacaacaaaagtaaaatagtgtttaccattttttaagtcctatatttcacagtgtaagttcaatttatctatatctaggtcacggcgtaccgatgagtccaagtaaattactatatagatatcaccattaccagttcttgggtctacaattaatattacgtttgctaatgtaccagaatcatctctataagtcgagatttttttattaccaataatactttctactttaaaacgataaatcacgccatcaacaactatatttttaccatttctagggtcgttagtcaatacatgccacgttcccttagtactacgacaatatgtttctgctgctgcaccataactaaaacatgaaaataatgcacacacaagtgctattaattttatataacttttcataacaaacctctaacgagaaatacttctgtacatatatatagtacagaagtatttaatactatagaggtattttgactgttacatcttattcgtgaacttgaatttgataatatcaatccaaattttaacatttccggcaaatagtgctttgattagccacataattgcaacaaagttctcaactaaatccaaagttttaactactgcaccgagtggaaagataaaactcaaaacccatacaattactgaaaccacaacgactgtatagaaaatacggacaacaggcgaatcaagcataaacaactcagagaactcttttttatcattatcatcagtaataaagcattcgtaaaccagaagccaaatcagaattaaagacggaattgaaattagtactgatagcatattttttacctcaagtttaagtgttaagtttcagactacaggaaccattatacagtactactaatggttgtcaactggtttttcttcaataagcataagataactgattacgaagagtaataccgacacaatatcaataacagtaaagctcacgggaatgataatagaaaccagtactaatgccacgtttagcaagaatacagtagtgatatctacaatcggtcgtttagtggctaatgctactagtgtaggataaaacataaacaatagtgcaacaacaaaacttagtactagatacatttctttttcaccttaataaaattataacacaaaaccacatcaacatctggttcatcatacaagtactcaaaacgttctttacttcgtttagtaccaatataatcaccattcttatgccaacgccatccaccatcctttggttgttcagacttcagtactgggtgatagcacaggacaatttcttctggaccttcaattaggttcttgtacttcttcataatctgttcaagcgtatctgctacaccataagatgaatgcataagataagactcaggacgtggacgtccacttggtagaatatcatcagtactattaaagatagcacggaagtcttcagatgtgtatagacttccatcttcatggatcattgggtattcatccactacatcgtaatcagtgaagtgttcaattgcatgtccaggtcgataacctgcaaggatacctgcatgtttagtctggacaatagtcataacagatgtattgttgtttacagttggatcatgaatttcagcccagaacggatgatttgggtcaaaagttgcatttaccaatgtacactcaccaatgtaatcaaacatagtttccttgaagtttaaagaaaccccacgtaatgcccagtcaggtgaagtgatgaaattaagattaactaacataagtatcctcatatgcatttttttgatgtggttattgtatcaaagatgtatcgatttgtacaacatttattgtaactatttcgtacatatagtcaggtgcattgaactcagcataccactcaatgatctcacaggcagcatcaacttggttgttcgcattaacacgtcttgcataggtactagacattttatatctaccatttacatacacgttatatacaccatgacaccaccacatcttagtcatttatgctaggccatactttgtattgtaagttctggtattgaaatttaccaatttcatttttcttacggaatgattcatctacttgaatttccgcatcgtactgaccatcagcctgtacaacgtacttaaattcttctacgtgtgaaaaacgttgaccttcaccttctggtttatagacttgtactaaaccttcaactagatataaattcatttatcattcctcatcactttcagttagcataatgcaatgtacagtttccacatagcggtgtgttttaggtgtgttatactttgtaatttcatcaaacaatttaaacagtgcatctacttcactaagagcacgaatgaatacatccatcttggtgactactctggaaaacccgcgtatgttattaaattcagagacgtgttcatacacaacatagtatctattcatatattaaaaagttccatgaattcattgaataaagaagttctaatgcacataacaaattcaaagtcaacatcgatggtgtcaagtagtttgaacaactttggtactaatggatcattcacctcaaagttatgaatcaaactttgttgaaacacattttcttcagtactataatcaataacaaaatattcagcaataccaggtggtgtgtaaacatcatataaaatatggcggtgatgatttgttttagaactaggggaatatataagttctatttcataagatttatcagcactgcgtgcgtaacaaacaatatcagtacttgttatttctgaaccatcacttctctctgaaaaacaaatatcagcatatcgttttccagagagattcaaaagatcatgagttgttttaccataacagaaatcagtttcaatgcgtatcacatcttgatattcaattggtcttgtatcgcggcgttcacgattaaacactaatttcaacaactcattaatatccattacttagtctcaataacctttagatttacaaagtcacctttaatcttcatacatttgtattcagtgcgagattcatcaccagcatcacgaggccaatgagttgcagagtaacactgatcaggtgttttatatacaccttcaccaacggtgcgagtgatttcaccattagttagtactactgcaagatataaagtaaacatattagtccttagaataatttattaataataatagcacccaaaccaagtactgcaataattgcagatacccacattaccgcgttcactgtacctgtgagttctttatcaaactctcggcacttcttgcggtaatcttcccactctttgttattcacactgccactcctaataggtcggtagctttcttgagtactacatcaatcgtttccagtactgcacctttgtgttcgattgatacaatattattataagtatcaagatccaagtactccatatattcagttttgaatacacgaacatcagtactagtgattttaatatcacaacctttatcccaaataacctgcatcatttcattggtagtcattattcaaccttatcataaacaagtttgtgtgtgcttagtactttgttgtgatgtccagggcattcatatacatacaatcgctcctgacgtttttcccaaccaccacagatacgacctgattgtgtacatatttcatactcgttaataaaagacttgcctgtgaatttacaatcctgacgaactaagtcttttgcactaaacctgccgtcatcattacatgctgtaagaaacattgtacagaatacaaagacaactgtcaatagttttttaatcattgaatatcaccccaacggaaacctttcatataattcaaattcacctcaactagttcatgtgtttttgtacaccaaatggagagagtttttgtaacatcaccaggttcagattcataattcacacaataaccttcaatgcgtagagttttgttagtccaattttcccactcaatccaaatttcatttggataataaaccatatcttctttgaacgtatggaattgatccattggtaaatgacctttaacttcaattacttcagcacttcgagcaagtttttcaagattgtactttatttcagcaagatattcttcatcattcagacgagtgaataaatctgttgcacgggttgtatcaaggctcattgttgtactccattaatcactgatgtatgcatacgaattttcccactcgtatgcgacgaagaagtgtttgcattaggacagtacacagtgtataaagtcgcaccagcaccatcttgttgcatacgataaatcttacaccctgcttcttttaattcagcaggtagaacaaaatcacttgtacgttctttggtagaagcatcacatgcagtgagtagaaatgcgacgagtactgctacaatgtatttcattaacgaacctccacttcttgagaaagagcatgagtcagtgcatttgagttcgaaccattcatttcacgctgacatacaaacataatggcatcttgtactgaacctgcgatttcatactcacgaccttctggatcagttaccagatgttcaacgatacaaccacccctcagtacagaagcaccagtacttacactaattctgtaacctaagaaatcaaactgcatacatgcgtcagtaggtttcatccaataaccgctgttttgattcaaatcgatgattacaaaaccttgagtgttagtttgaaacatagttaattccttaattaatttaaaagggtggaaacgcagtgacgagtacgattatgctgtctttcctttcactgcattccctttgatataaacattatactgctattattcagtactgtcaatcgatataagtaccttttttaacatcacagacttcttccatccaatgtggattttcgtttttatcagtgaagatttgttctgcttcttcttttgtttcagctaggacaatacgatccccttcatccaaatcacggatacgatacacttttagatcttgtttcttctcaaagatattacacagttcacgtgctttttcttcatcgcacttcccttcattagcataaaaccagattgcttttttaataaggtcacgttcttctttagaaaaagacataatatttcctatcatttgttaaagtggatttcgtttgatataaacattatacagtactgatatcttatgtcaagtattaatcaccaaaaatcatcagatacccaaaccaacccacacagacgactaagctaacaataccaaagacaatctctaaagtcatgttgtatccttaatcaatgattttatattcacgatgaccatagaatccagcctcaaggatgcgattaccatcagcatcttccaaatcccacccacgggatgtttcggcaataatagtcatgatgtgacctcttgggaaaatgccactcagagtggatacatcctcaagtaattgaactttctttccaacattggaattcggtttaaacattttatggcccttattcattgatcacatcaagtactttatccagctttttaccaatgctttcctttggtttctcaccattctggaatacattagtactgcaatagtcaggacgtgtattaggaaacttctcctgcatccaactatgaccatacacacccagcataataccaacaataagaatgataatttgcatgataaacctcttaattaatgttttatttaagaactcaatatagaaagtatactctagtacttcttatatgtcaactattattctttctcaccaacaaacagtttaacttttgtattactgttataacaccacatctgttctttgttaatagacatccagatatttttattgacctgttcgtaggtactatcacgaacagaaatacattgattcatggaattcattggagtgatttgtacaccgctttgcatggaaagagctactactaaaaagattactgaattcattggatattccttaatggttaatcatccatctcttcgagatgtctgttcgcttctaatactacgtattctacgcgaatgattaataactgtcaaggacttttaatattgacgggatttgaggaagggatttttcttcccccacaaggagggaaatttgacgctgatggtatcagagctattgcattgaagattactcataacgagtgcgaaagcgggtcatcctgtttctctctacttcagtttcatatgacggtctacacttttaaacatagtgtatcttcattaagtatctatgcaatcaaatacttaatgtgagtactcaaattttggacgcaactttcctgtacaaaattcgataactctcccttagataattcgtaaggtgttatccttatatgtctatcaaggaaccaccagctatcctaacgtggttctttatacagccgcattgccgtgaggggttcaaactatgcccacatctaacgggtttcttttgctgttcgcactgtcggactgctcaactgccctctacgttttcgagtggatcaggtacatgaatatcatgccaacagaattgtacaagataattatatcacaaacttttacttcatcccataaaaaaaggttggcataagccaaccttttttctttagaaatcttcgtattcgtacccttttgcaagtactagcttcttaagcttttgcatagcttcactgtactttcgatgtattgatgaacgggatttaacatattttccattatcatcaacaaaaccattatcagcaatctcacgaagcgtttcaggttcatattcacctagaccatgaacacgctggataatctcacgttctttagtactcaattcgttagtcagttcattgatagcataacgtaaaggtgcacgaatactatcaacattgaggttaaaatcagaagcaggtgaatgaataatgtcacctagtgtaccatcggtaacaccgtctaatggtgcatccagagaagtgtattcgctttgaaataacaaacagttattaacatgctgaatctcaatcccagtaccctctgagattatttcaggagttgggcgaacaccatgtttacgcatatattcctggcagaatctttttactttgatcttatgaacactcatataacgtgggaagtgtaccatatagttagcgtcagaactttcgttatagactgtcatgtaaatactagaagaagcataggtaatgaacttaacattcttattaagatcaaaggtttttagtgctctcatgaacccctcaacaccatatgaaatcttatcttcaaatgggatataacaagtacatttacttgctacatcaataataagtccataattgtaacgaactaacagttcagtgtttttctttacattgataccagcttgaatatcacgaattagatcttcattggaaacatttggtggtcgcttaagtgtaatattatatttgaaactgctttgtactttaccttcattttcatctttatcttcaacgaaatctaaggcttctagtgtgttgacttcttcattagcaaaacattcatccagaacttcttcggcaattgtatttaaatcaagctttttcacttacatctcctaatgacgaaatcaaaatcgatatacattaatattatcatctgtgaagcaatcatggttatgcacatccatgaaagtactaaacactttatcatataaagttgtatgttcttcatgaatagcagcatctagcatgtattctccaccactacccataaagaaagtgtagtcttcatgtagatattcaagttttttaataaactttcctttagttaaaatcatatgaataacataatctttagaaagaagcacacaatggcaacttaactttctgtcaggtataactggtactttattaattaaccaatccagtactttatcaatttcacttactgacccactagcactgaataaacggtcatgtacatataaagttttttgattaacaactccatattgatattttggtcttagtgggaaaaaaccaaataagtttcgtggtatagttgacgtaactctagaatcggtaatcaataaatttaatcgtttatcaatataaacagttgtcatattaaaccttatctaagaatttatcgtatatataaaattctttatcggtgaatacattaattctagtatcgaatctttgcatcgtgttcatatacaatgaactttttaaataaaaatacaaagcaacaaattctgatatatgcatattctttttattgttacataaattctttagcattttgatgctatcaaattcttctttatcaaatctgtactggtaaaaattgtatctattggttcggcactcatagatacgaagtgccattatatcaatacattctttagatttacagtacttattcaatacgtcataatcacccgtacataatgctacaaagattttatgtgcaagcgtagctttgccctcaatcgtataatagccaaaaaatttaatgattaagtactgaatgaatgtaatcatttgatttagaatttctccgaaattactagagtgtcatcataatcttctgcaatctcatgaagaacttttaagttactttcaccagaaacgctttgtacttcgttcaaaagatagtttagatcaactttagttactttttctgaatcaaatacacagaaagtcaattcagcatttggacagatcttcttcagattatcagcaacaacttgtttgaagttgaaagatggggaagcaaccaggttaactgcaacgagaatagatttcataatgttttcctttctagctgataattaaattaggagcacattgtactccatattatttgttatgtaaaatacttttagataccaagtgcagtagataactctttacgtttgttatatgaatcagattcaatcttacttttcttgttgaaaagggattcaatatccttatagattgcttcgatagatttagttactacccattctgattcttgaagcataccttggagtcgtgcgtactcaactttgatagtactgcgaagttcttcacaaacttcttcattcttaattagtgcagcactaagttctttgaccttatcgatgttcataagttccttactctaatttgtttttaacaaaataattatatataacatactaaattatgtcaagtatttttagtaccttcttctgccatttttgtgatataccaattaagtactgatttgtgtaccataaaaaatgtgaatgcaaatatagcaatagctgctgatgtaacactattagataatgacccaagttggatgttagtacctaaaataacaataaatggatacaacacaatcaatctactgtaaggttcgtctccagtatcacggagaaatccaagcctttcatgatcagtatccatagtgacaattggacagaacataagtgcagacataagagcaataccaatttgtgctacattggaaattgtaaaccacaaaggatttaaaccatatgaaatattattttctgtacagtagtaaccaaacgaattgaatgcacaaactaaaaatacaaaaatacaaatcttattatagcctctcatttgtttagctccgttaattttcgtttaacttctagatcatgaaactcatctgcatatgagttttgaacagttctgatgtattccaacataacaaacatagttccacatacccatagatatgtatagtaatcaaatacaaatgcatataacatacacggtactaaaatgaaagtgtaaacaaaactatatcgggtagttccaaatactttcagatataacaaacgtcgatgatcacgggcaaatgtattgatgcacactgaaaatgtaattaatgtataccatgaaataccctgaattaaacctgaaacatttaaaagtttatgttcatcggaaaaccccagtgcatttagcactggagccacaacccaaccaataatactaataagaaaaagatattttgcattacttagtgtgaacatattactttagtccccatgcttttttgattgcatcaacagagttttggtccactacttcctttttttctgatgtagtttgaagtttattaattacatattcctttgcatctttttctatcataaatttaccatcaaccaacacaccaaaaactttagaatttcgggctggatatggattaatttcatcaagagtacggactttcttatcaactataatggctttgatgtaaccagtttcaagtactgttgtaatcacagtcatttcaattgcaactggtgaatcctcccaatatgcaatccatttagtaaagctacgatcaggtgaatcttttgtgcattttaatttaattgcactattaaaaatgtattgtttaaaattgtcatcgacaacttcactaatactcaaataaccttcacgctcttctgtgttacgtttgaaatttgtagctaatacatccattttccatcccccttgggttacttggtgtgttaattataatactaagaatctttgttgtcaaacttttccctcaaatatttttctattaatctaatttgtgttggtggtaagataaaataatcgtacatagatttactaccatgtatcgaacaacctacactaatactataaacatatggatataagtatattgggtcttgtatatcaggtatgaaaactattcttgatatattaccatttcctattcttacttggacgttatcattattattaagataatttcttatacagtactcaattataccatttactttagaatcataaccataatttttatattcaggaaaaatgaaatagcgttcatggtatagatatgagcatagtaatgctgggaaaaaattccaaaaaccttcatgctttgcaattgtttgtgcatatttaaaatgattagcattactaaaaatattatacagcacaaaatacacaaatggactaaccaacaacactattgttaacatcagaagcctctgtatttttcatacacttcaacgcattccatgattttgtcatcgtccatcatatcatagccttgtagaaattcttctttatcaaccttccctgccatcatatctgtgtcagaaattctggagtcatagaagtaatacatatctttatagtactggtttttgtgctgctcaatctttactttagcatatccagcacaaaatgaaggagatttaacaacttcccatttatgcttcttgatgggtttatcattagcatgtttttccctgtatgtctgacgataacgttcacgcatttcaggcatgtattcttcagcagtacgtttaggggagttttaccagtcccaatagttttaatagtttgacgttgttcttctgcgtgtactggggaaatgaaacatgatgtaccaaacagtactgctacgataaccataaaattcttaaacataatcaaacctcttttacaataatatcgattgatactggaattgcaatttcactattacatgaatatacatcagcacagtactcaatatctagtactttataatatttctcaaaaccacaaatggtaagattcaacgttgacccaactgctgggagtacaggaaatgataagaacgcaattttagaatgaaattcttcattgatatcttgatatacagttgcagtaatcacaatggtaactcctgtagtggtttcataataccgagtactgggtgattttcaatcattggtcgccctggtacaccagtgaggataactgggatagaactaatatcttttacatagttgaatccctcaaacgtgaactcttgttttttctcattatacaatacccatagtattacgtcagcttttttctggatattttttaactgtcgagtactaacacatggtccaaagtcagtccatgatttatacttgataccttttacttcaatacgaaggttgtttaccttaatatcacattcaccgtcacgtgcttcattttggaatgctggatcgatattaagtttaataccagtattgttttcaatttcattaaaaagtactaaagatgcgtgctcacataccataccaacaaaatgactatgtgcatgattaaaaccatatggcgatttactggctggagccaaaagtttatatcgttctgatttttcaatcgcttttgccatgaaagaatcagcttcatctttatataacttaacagtcatttttccatttttcagtactaatctattatcaataacattcataaaaacacctcattattcattcactacatgataacaccaaatcatacaccagtcaagctcattttttggatatgcataataaatacgttataataattataccaatggagggataaatgtcaaggtcaattgctgcggctggacgctataagtttggtgaatgtggttatgttgttgatggtgcaatcctcaacgatggaactagactaaaaaatattagaatctatcgccaaagaagccatagattatatgatttagttgatcccagaactaatataatatatcgtaaagtacaaataacaactaaagataataaaggttatctattaaattacaataaaactaatgaccaactattaagtgaaattaataaaaattgtttctttgttcgtggatattccgaagagccacaagaaactgatactggatttgtatataaattcatgctacataaaacaattttaggtagttcacaaaccttgtatcatatgtatacacctgaatgtggtattatagatcgtgatatagataacattctcatttcaccagtatttgttggtaatgactcaattagtggtaaattattcaatactggttcagaaattgataccaatggtatggtaataacaatcgtattaccagacggaacagaatactttactacccaatttgttaatgatgcatttacaattccagttgatgttatcacacaatcaggaaaaggtactgctacactcacttctccatattataacactaaagtggtggaatttgatgttcttgaaagtggagaagatattgattttgttacatcagttcttctatcccaatttgaacctgtttcggaaggtgtattttctgcggttgttccatttgatgttcatgaacgtggacagtacttagcacttcaagcatacagtggtgacttatatcaagttggtgtagatctttctgtagacgcagaaggtaatattactgtgtatcaaactgataatttacctgtttctttgagtataatcggaaaaacactgcatactactcctttccataaagaatatactttaagtgagtgggttctcggtgaagactctatgtactctatctcagttccagtaactgaacatggtaaagcactaccacaagttcaattatattcttcagacaatcatgtagttcatagtgaaatacaagtggatgaagatgataatgtaattcttaaagtagtagaaccgcttgactgctcagtcgtaatagttggttacaacgcataataaaaaaagccactacaatgtagtggctttaattttatctaattatttgaaattgtcacgtagaacttcttcaagtgttttatctggattgctaatggctacattataaatcaattctttaaatgcagttagtgcctgctcagttgcttctggaccaaagttctcactaatgcttttaaacatactttgtgcacgttctgatttgatacaactagttacaaacttgtcaatttcattacgaagctgcttagttgtcatgtcaccaatgagcatctcactaatttcttttggttcatctgcacttgttcggacattcgtaaaaccaaatacatcatcacctgaaccaaagctacgtttttcttttttggtttcttttactggttcttcttcaacttcttgttcgtattctttagtaaagagatgggatagtacatcatcaagatttttaaccataccatcaatacgagattcagcattcttggatacatgtttgaatgcttgctctagtgctttttcttgaatctggtcacgaacattattaactacattacgaagtttttcattacagttgtctaaaatttctaatacttcaccagttttgattttttccaaaagtacatctaaatcagattttacattttgtttttgacttacttcaccattaagaattgaattcaattctttagcaccttcaactgcttcttcatgtgttttaaattcaactggtacatcaacaccatccagtacaatattaagcactttaccatcaacgtaggcgtaggagtaagatgcttttttgaaagaaatagttttgaagaaaatgttgctcatattgatatactccttagtgcccactagctgggaaggttttaaacatatagtgacattgtactaaatcatcgaacttcaaaccgaaatctttagtacccatcaatgtgtgataaaaataatgcgaaatcgtattagtttcagcgtctttaatatagataccaaattcggtacagcaaaactgaacaacttcattataactttctaacttggaaattacaagtacttgatcataagaatttttatcaaatccaatgatgtacatttcctctgtttctgggtgtacaatcatcccaccgcgagaaataattttctcgaagttactgctcaagtactgaattgttgaacttaagttcatttacaactccttacgtattactcgtccggtaagatgttcatctgtacagaacttcattataaatgcttttagatggaagtcttctaaaattctatatgcttgctttttcataatgacttccttcttctccacatcaacaattatatcatgtttctcgtgaagttcctggatcatttgatatgaattcaaacttagtacgctcataaccacctatgtcctccatctcccacaaaatttgaactgccacttctaattcgtggtgaatttgaaaataaccattacttgcagtatagatgtagccatttttagtaattgcataaccccactttttactttgagaatgcatctcacgtttcaacccataaggggaaggtggcttcttgactggttctggttctcggttttcgttgtaaatctcttgttcgattcgcaacgctttatgatatgagtatacatgaatcaggcgacaaagtacaatagtaatgcaacaaataattgtaaatgttatcaagctcatcaatttgccctctgcctagatacatattcattaattgcatcttccaaatcataccctgacatttttacattatcaatagaaacatgatattttttcagcactttttgtccagcagtgttctcccatatcgacccatcaggttcaatatgaactttatggttcaggatgaaatcaaacatttcttcttttgataagtttgctttacgggtttcaatgtgattagtagtaagtaattcacgagtatgtttaattccatattcagtgtgctcaccaacactacgatgcaaaacttttaactgctcggcagcagtttcttcatcataaacatgaatagtttcagtactatataaaatatcctgaatattaccagtacttacttctgtccaagtgtctttgaaatgaattttgattgttttcatagaagctcgtattagttatatgctgtgaataggtcaatgtttttatcatctacactgattaatttgccagttgaactaacaaacacaatatttccacctggcgttagttgaacacgctggttaactgaatattgcccattaaggttgtaatcagcccattcgactacataacgttgaataacaccgttagtatcataaagataaacgtgtgtcacgtcacgcattttcaaacgttccaacaatgtagagttatccatgaaatcagatggtgtattgcttcgtaaagcaataccaaactcaccgataacagtactaattgtcagtccgtttgaaaaacggctacaaagagtcttctcatcagcaatatgcatccataaaacattctttacatcaatatcaacaaattcacagttttcaaaaaccaaacctactttggaaactttaccattaaattgcattagtaactcctatttttttatattttaaaattaaatcactcacggctttcattagattatatggaatagctaactctttaacagtactatccataaaatgttcttcttcggtatcataaaatgttgaactatagtgttcacaatcatttatactatcataaaaagaagacgtaagtttatcgacaatgacagtgatttgtttaccagttttggtatatcctacctgaacggttaatccaatatcatcagcctctacacgaattataaacgaattattagtatagctcagccaacaatcttcaccaaagtatacaacactgtgtttcttctgaaatgaagttgtgttaagaacgccaatagccacatcaactgttttttcatttaaaatattagacatttgtgttcctgcttcgtatgtttcgtgaaatctcaaaaataccattcaactgttcaacagttaaaccctgtaaatcataaacagttgatagttgaaagaaaagttctgaatctatactatcatgttcaattggaagattcaagaggtctttgttaataaaataatcatatgttcgaattgtcaaagaatcaccaaagatatcaatgtaaaatttcggaacattatgtaacgaaacatctattaatatgttttcagcctctctacaagaaattttagaattatttttataagattggtatgaaaaattataaggttcatcgaccgatgtgtatgatgaggtatcaccttcggaaaatattacaccacattcaataagatgtgttaacgacttaggtggaatttttaacatttcacttcccatacttactcatattactacgaatcaccccactaagaaaacatattttccttaatgtatcataactgatatttgtaagatcatgtacaaaattcaactgcaagtacatttcttcagttaattgattaaatgtatcatcaacacaaatgttagtatgttccgttatgtctatttctatattattttcccaaatatcaatgctaacagcatagtctgatgtatgccttgattgaactgaaataaaaatattattactgttgtataatgactcggtgtacccattcaaaaatgatccaacagcaacatcaaaaatgccatctctaattgggttttttgtttcaaacgtatcactacaaacttgacggtatacaatgtcaacatacttatcaattaaagtaaacaaataactcattgcattcacctatataagaaaaaaggccgattcattgaatcagccttaagtataacatataagaagttaaaatgtcaacttctaaattacagcatccaagaggaataaaaagatactgttagagggtaacgaatataatgaatttgagggtaatatcattatacgtaaaaagtgatagcttctatacataaggaggaatcagtactgactagaagctatcgggttaaacgatttcagtactgagtgtttagtttaggatgagtatttccatcttcgatttgttttagaatcgagtcacgaatttctactgccccttgataactatatttatcttttgggatcacccatgtatattcgccatcagtggttttaaaatcaatacatggattatccctgtattcagatgcaatgattgcaataacatgtaatgaattcaatgaatgatttgtataaggataattgttattatctctgaacgtgaatgttttaagttcatcaggtgcaacaatgaattccattattcatcctcgtacttcttgaatggtggaacatctaccttgaagtctttgcacattttagtggcacgtacttcagtattgttgtgataatttttcttaaattcataagaaacataattacgaataccaggtgtatgaataatagcaagaaccaatgtacgaccaaacaagcataataaattccagaacatatgaatctcctaattgtgggttttaaccaaacgtgagacagctagtatagcattaacctcatccaatgtcaacccaccaatgtcattaatcattgagtactgaaatagtgattcttcagtgtaatggtaatcatgagaagcaataaagattgctggtttagatgcatccaaaattatctttgtcattgtactatatatatcaaattgatataatagattttcacctgtatatgctacgtagatattatttgaataggctggatgcaccattgtaaaaccatcataacataatatttttatgttcggatcgtcaaaattgcctgtataaaggttattacaaacatcttgcattatacgtactattagactagtcatttaacggatttaatacctcttctggaatcaatctttgaactttaaggatagcactaatgtcatcaaatgttaatcctaatgtgttgttaacgaggcagtactggaagaatttttcttcagtatcaatatcgttaacattcaattcaattgattcgtcatcataatcataatcttcattatcacattcataacttctgaatataactttttcaaaatacacatcaaatgaataaaaatgattattgaattcataaccaagaaaaatattaaaacatttactcaaatctgtggtttgattcaaatctggatcatagcaaaatactctaacttcaccaatatcttctaattgtacatcatgcaatgaccatgcgttgttttttaatacatagttcaccattctaacaatgttgtatttcatagtgtacctttattttgtgccgactaccggaatcgaactggtgacatttcccttacaagaggaacgctctacctactgagctaagtcggctaattgagaagtaagataaccaacaattctctatactctcatgatatggaggggaggtcatcttactgtattatttattattttgaattttgcttatttcgacgcatcaacttgattaagccaagagtcggcataggtgcagcactacaaagttcttcaagctgcttggtagtttctttacttactttcatttttactcttacttttatctaatgctgcgttgataaatgttgacaactgttctttcgtcattgtcggttgtagtttcttactaagattctgtttacgcttcattatacacccaaatgatgttatgtcaattaaaaagtagtactgaatactgttgcaacaatattctacagtgaccattttagctaaaggtgaactgagcatactcgaagtacctctcactgtattgtaccataataagtccttcagctattcagtactgaatacttacatcctacgtctaggttttaaatgtgcactagttgtaatgtgtaggaacatacgggtcagctttaaaactactgaatcgggaatcacaacctccctggtgattcagtactgaatacgaccgtctacatttattttaagagagaatgatgactggaactaatagttttccatcttcatcaaatgaatctgaaaaatcttcaccagactcttcaacatctgtgtctcctgcttgatatgaatgagcagtttcgcatttaccaatcgcatagtcatcataaggcgaagcatgaataagaatatctgcttctggattattctgtaaaattttaattaggtctttggctttcatttataatacccgctagtagtttaagtctgcggcgttgaatacaccaagtgaagtcttaccacgtagtttaggtgaaaggacatactttgtcaatttctttttaccgtaccagcgattgaattcgtcttcagtgacatatgggttctggaaatcgtattcgcgtttcttatgcagttctttagcacgttctgcaatcttggttcgttggtcttctggaatgtcgaatgtattgttacgttcacaccattcgtgctctaatgcaccctgaagaaactgttcggtttctttgactagagtgattttagtcaagcctttttcgatgttcatataatcatcgacgtatccattccaaataacaatctctggattgccgtcaatttcttgaagcattttgatcaagtcattctttttcatttaaattcctagaaatgattttcaatagttaagtacattgtttctgtaaagaaaccatcttcttccatttcatcacctgaaatagataaagattcaaccttgtactcacccgattcaatccagttcttaatttcttcacgattacctttgtgacgaacatcatagtaatgaatagcatccagtactgttcggtaatcatcaatatcaattttagttttagcgattaattcatcatcagcatcgctttgaatcaagaaatatgccatatttgtttcctatgaaatgaatgtagcgttaattcccattataaatgcaaatataccaaacaatatcagaccgattggtacaaagatcatagatctatttccatgtttcgataaaaatcgttcaagtataattaaacgtattgatataggaaccattataataatatacaatattgaaagaattaaaagttgcattttaatttcctattatcatttcgttttgcgactctggaggaactcgaatccccaaccaattaattaacagttaatcgcaccatcaattgtgctacagagtcataattatttacaagccatgtcttttcaaaaatctagcaaacacatttttggaagcaccatagctttcatatatactaacttttttctcaccattagtcaaacgttttttgatatcttctatgttatcttctaaacgttttacggttgcaaatttcttagatggtatgttatttttggttctataattcagtactgaacctttgctaatattcataattttagcaatttcagtatctaataaacctttgtcaatatattcttgtactttagtgtaatcaatagtactttcaccattcgtctgagttgggggtttaaccatttttcttgtacattctacactacaatattttgtatatgatttaacttggttatgtctacgttggaaggttttattacaacacatacatataaactcatcatagcttgctttgtgaccatttgcaatagatttttgtttatgttcttcaacagataaaatctgtaaatttgttaaatcatcatttgtacaatcttcatcaatatgatctgcttcttcatcttcagttagatatcttcctgcttgtacagccaatagatatctagcgtattgtgtactgctatttttttgtccgtgatttgtataaaatcactgttcgacggttttcaggattaattacaagataaccccaatcccagtccttattatatggatattctaaatttattttcattttttttatttaatccaaaatgatatgtgggccaagaaagattcgaactttcgatgtgtcattaactgtgagcaattatgagttgcttggcttcgtcccctagccaattggcccgtgatgtggtggaagggtaatgataacttcactacgttcttaaaaggtaatactcggtattaccaccttccataattctattttatcagtactgaatactacagtcaagtgttattttcagaaaaaaccttatccaacactttaaatatcacagaatttaattcatgtggaaacacattttcatatactgttcttttctgaaattcatcttctgcatcagaacttaactggaatgtaatgtactcagcactcaaactatttactatatcttgcaaagagggtttttttagtttttttatttcttttatttcttctaatgattcaaaaataatttcgttatcattaataataaatgattccccattttcattaaaaattcgaatttcaggattatcttcactcccatttttagaagcttttgatgttaaattggaatttaaaaacgattttaaaaactcttcatattttgatgaatcttcaataatcacataaacctcactatacgtaagttgtgaaatttggagcggtaagtgggacatcgaacccacatcatcggtttggaaaaccgaggtaatagcctttatacgattaccgctttgaaaacattatacagtactgaactatttagtcaagaattaattcgcatttttttgaattcaccaatcaagtacttatagaactcataagtgaacaatggttcttgtacagtactcatttgaaaatattcttcttctgtctttggtacaggggaagtatatgaaatatagggattataatcttctcctacataagtagaaacttcaatattaattgaactaagatctttatgtaacaagatgtttaatataacagttcgttggtcaggagtttcttcattttccatccactgtaaacacaatctcatcagtttatcccaaatataaaattggaatttataatcttcaaggttgcgttttattgcttcttcatattcactaaacatatcaagttgccatataagttaagatacaaacattatacagtactgaactatttagtcaagctttttttaatcatctgtacacaatattcatcagtacttcttcgtctagttcagtacttaagaatgctttgtacatgcacttaacacgtataacatcccacatcctctgatctaatgatagacaataaggattccactttaatttctggagtttcaaccagtcagcgtgtgtcattttcttaccattatttctataaagaaccattcatatacttggaagtttataagtttatcgtattcttttgggtctgatataatttcccaatgatactttcgccaattacctataccagagtatctgaaatttagatcacttaaccattcttcatgggtcatgagcgtatcattaactccattacaaaccatgtataatatccattcaacacatacatttgaagcttttctggagtactaatatactcccagtggtatgttctacatataccatcaacaccactatatctttcttttagatcgttgatccattcttcatgtgtcatatttataaatatcgtttcctagcagaatttttatttcttgctttgtatgtcgcagtttttgaatgacaatttggacacagtacttccaaattagaaagttcattattggatgcatcaccatctttatgttctatttcagttagaacagcaccatctactggatgtttttcatcccacccacatttctcacatgcagtaccatgtgtttcatgtatatattttctaacaaaagaacataattttaatgttttacctttatacccaggatgcacaccattcaaccatttctctacattttgtgtatattggtgttctttatggcattttcggttacaatatatttttttatttctatgattttctggtattttgtttttacaatttatacaaaattcaccagataaagatgattctgtattgggaattaataaacgagtattaccatttacgtttctcaatttattattatatgatacagaacaagaacgactacagaattttttattagaagtttcatgattgcaatttttacatttcactattattaaaccttgtaattaaaaatgtgtatttatttctcagttaattataaaatgaataagtaggccatccaagattcgaacttgggacgcatccttagaagggatgtgttatatccacttaactaatagcccattgtatgcggtgaaggtgagatttgaactcacggaggactttcaccctcgctagttttcaagactagtgcattaaaccgctctgccacttcaccagtactaataattatatcacatctttttgagttgtccaagatttttttgagcggtatgtcgtaatcgaaacgaccagcagtggaaatcggaagtttcacctcgcaccttgcgataccgcatagtaatatttatcttgttattttttgtctctaaccgcaagttcgaagatgatccagtgattactgttttcatctagtacactacatgcgaacttacatttattgcgtaaaatatcgtaatgaccatcaataataccattaccaaatcgatcatatttattctttaatagatcaagccattcttcatgtgtcatttacgttgcatccaatgtgagccagtccagacttttttcttttcacgttctatttgtcgttgttttaattcttcatcccacaggatattgtcgtttaagaaatagttatatagttcttttaacttcaaattatcagaaaatgcgggaaagtacttattattgcataccaaactctcttggaaatgtacatcttcatctgtgatgtatcgatatgtaaaaattctattcgggtttggatagatgccatttgtttcagagaaacattttctaagtagatttttaccaaaatcacagataatagtgtctttacgaacgaaattccagcgagtaaccattttaattgttagagtttgatagttctgatctaagcttatttgatgatcaccatctttgtgcttatagtgataagtaccctgttttcgaacggttcgttcaaactcattaacattaattttacttaaaatttcagtaatactttccggtacatgcgtaatgagcattattgttctcctgattaaaacaaaagaatagcatatatatcagtactagtcaatttttttgtctctaaccgcaagctcatagatgaaccagtgattgctatcctcatcaagtacaaatgatttgaaaagttgtttatcttttaacacatcataatgaccttggcgtataccaaaaccaaaatgattatgtttgaattttagttcatctaaccattcttcatgtgtcatctcttaatatccatcttaatttaatattatcccattttagacagtactgcaagaatgaatgctatattggttagatcagcttgagaacgtttatatacaactttttttgatattaatgcatctaatcttatataaaagggataataatttattctatcagcatagtattttaaatgttcatatttcataaattaatcaccaaatgtaatagcataatacacatgaacctcaattgtagcatttttcccaaagaatgcatcgtaatacgctttattacttaccaagtgcatcaactgttcatttcaaaatttcatacttgctataaccaagtgttcagtttgtaccaaccattcttcatgtgtcatctttttatatccataactgcaatactaaaatatgtactaaaatcatcacaataaatgatattgttatagtacgattcgggatcatttaacaataaaaacaactccaacttaaagaagtatacatcacctgcatttatattgtaatgcatttgataccactcgtcaaatgttttaggctgcactgtatttacctttataaaaatccataattttagataacagtactgcaatagtataatctaaatctggataaagtaaattgtactgaaattcttcctctacactgtagttagtggtgcagtactggtagtctttataacctattgaaaaataattcggatacaatgtacaacgaaaacgataagcttcatctgtcatataatcattgtattcaacacagaagtatagtgattttgaatttaattctataagctccacgaaaccatctggtaatgtatgattataaatgatattatcattattaaaccattcataatatttttctaaaaaatcactaatagatacatcaagactttgtataggtggagttatgataatttgaacttcgttattcattttctccccttattatattttacatatgggttatcataaagatcataacttttctgagcacgttcttttttgcgttcatacataattctatcatactccttagctttcccatttgcttcattatacagttttaaaattagcaaaaatgtatcaagttcagggtagtttgctggattgatagtacttaacataaatcgttcttcttcagttctagcaacatcaaactcatacttaatagttttatacccactccatttatatgtgtgtgttactttgttagtaagtacgttgtattcgacgaaatcagtactaccatcaagtacacgagtaatcttaatagatgtaccaatgacaatctgtacagaactcatttctgaagttttaaagtaataaatgttattacggcgaagattaacttctcgatctccaatgcgaacatgcttaataacttccattaatggttctggtacaccacgaattggcatgttaatgctcctttttaattctatacattttaacagcactggtttcccaaaagtcaccatctaagttgctgaatttatatatagtttcgagattttcaccatcaaacgaaaacaacacaacatcttcttgtacagtgccgttatgtaacatgatatcataaacttcatttcttacaaataattctttggccttagaaatatcaaaatcaataaatttcatatatcctcctattatcattatttgtattatatcagagtttcattgcatctaccagcatgttttcataacttctgtgatgtgattcattttatctttaagttcgtgagggatgcaaatttcacctgggtttaacgttgtgttcttttgaaactcatcttcttcggaatcagccaggtaaaatgggtgtgtcacaaaggtatcatcaactgtacgcttatttggtttcattaatgcatcatgatttacaaaataataagcatcaatatcaggacggtaatacaaacaatcaaccttgaagttcgggtgtaaccataaagacaacgaataggtcatttggttaccaatttgtcttggtccagtagtaattgtattgatgttatttttatcttgcaccatttcataaatgaaatctatcatttcgtgtagttctgattcagacattttatttccttaaaaaaatacccagtacttgactgggtatttacaaagtaacgtttaatcagatttcttttcgtaatctgtaaaaacagtcaggattgttgcacatagtgaatcaactactgatgcacgtgtgttatcaaggtctttagctagtgcttgaatctcttgaagttttactactaagtcgattttttgattactcattacttctcctattggatgttttttagatattaatttttataccactaaggtctagaacttttttattagatactgtttctgattctaatttagtttcttttacctcagtgttaatatttacgtcatctttgagattatcagggataataccatgttgaatatcatcgtacatagaaacaacggtttcggcacaagataacatttcacgaactttgtactgataaccctgtggtaactcattgatgatttccataatatctagtaatttagtttggacatcaataagaatttttcttgatttttctggttccattactccaactccacaacattactttttttggatttaatcactgatggtggctcattaacgcttgtttgaccacgaagtgatttttccaacgcaatgatgcgttttaaagtttttattgatggtcgcttcttcgtcaactcagcttttgcttctgaataatattttcttacatatccataggcataatattttgaaccaatgaaaatttcagcaactactggatttgagtattgtgtatcaatcccattctgttctgtctctacagtgtaaaatgaaatatttgtatcacatgctgaaattttagccaccaaaagatttgcatcgaacttatctaaaattagagaaattgttttttcggcatcagcactatatggcatagcagacattaaaagttggaatgtcttaaagtacttacttccactaatcatggtattgaaaatcaatccaatggtgattaatgcaagtgtaccaatacacacaaacaaaaaccaatattcaacactcatttataaatcctcttactttatatgattaaaatgccccatcaaaaatgatgaggcggtaagataaattacttacgatttgctttacgcagttcagatagttcttcttgaagacttttcttccatgcaatcaagtgagcaaaacggattggccttgcaccagtaccgtggaatactgctagagcttcttctgcttgatgaatctggaattgaatgtagttcacagtgcggtcgaagtcggtgatatctagtacttgtgcgttagtttctttagccattttaatacccttttatttcttttttatgaaaaaccctcatcattgaggaatggtttgcattttaatatctgccgataacaaacattatatcacaatatctgttcttgtccaatttttaattattagaaagaacaatttttgaaactggtaaatctgtattatttacacgttgttcattatatccattctgtacaagaatgtcaataactttagacttatcaattgtaaatgattctaacatatcatatcggtaataaccaatagtctgacagaactcatattttcctggctgttgacgacaacacgtatttgtttcagccataatcttattgattaggtaatatgtttcagtactatcaatatttggaatatagatcttatcatcaaaatgaattacttcatgtttattcatagagtgattcaatctccgctttaagaatggaaatgatctctttctgaaggccagtaatttcactgttcaaagatgacagtcgcttcgataatgccatgaattgctttgcatcttctttagaacggtcatttcgtactttatcagaactccagttagcatatgattgctcatctttcctgttaaggatatcccagtctaaacgtactagtttacgttctttcttcagttcgcttaagcgagatttcatttcttctttagtcattaaattgttcctttcatgaagtctggaataacgattacgataggaggattatactctacataaccattttttgtcaatagacttttaatatctgaaatcacattatcatgctgttcaatatctttatcacaaaagatttccaattctttctgaaacggttttttaaccgagatgttttgagtcagtgtttggattctctgtaacatatcaattggatctggactgaactcattaccaacataaagagtaccagatgcatctttttctagcaagacttctaaaattttcatttcttatccttcaatttactaaagttttctcgtgtaaatccaggaactggaaaatatacatcacagtcaacatcaggattaataattaccatgtcattacatattatatcacgaattttactaccgtccacgattttttgcattaaatcattccattttttacgagaaacaacgaatgtactaattatacataaatcatgtccacgttttgaaatatatcctaatacttcattatcgtaaacaacacgtatggtaacttttccaattgttacccctcttactggattaatactagtatcttcaaaaattaattctaatttaagtttaccatttgaaataagtgatgaagtatatttagaaaccattttatcaatttcttgagtcaaatcatctctacctagatattcaaatacagaataagttaattcgtctgcacctaactgttggatagttggaagctgggcaaccatatctaaagatacaggttcgatatatattctttcaatatcagacgattgtataaatagacaaccatcaggtgtcgtatctctaacaatttcggcataatatgtataaagataaaaaacattagactctgatgagtcagtttctacccaaatctcagattgtttcatttcatctttatgaagaattcgttgagtaaatcctatgtaaaaaccaagatataaatcatcatcagtttcaaacggattaaacatcaaatacggatatttgtcaaggtactcattgaacttacgctgcacatctctatcacaatccatgatatactttcggaattcagaaatgattattttttctaatgacataatcaatcctcaagatgcatgtagtacataaacatcgccaaccatataaaaaagccgaaacaacgaagtaaaatatcaattgttggatctgtcccaccattaacttggtaaacgattactgggattaaagcaatagtaagagacacagcacataagatgaatgcaacaaacacctcaaacataaacttaatcgtttccattattatccttcagtgtgtagtgtagtacatctaaaaagttatacattgattcattacgcataaccttgattgttagattacgacaacccaacatacgtttgaggcgacgcttcaccgcagttaaatcatgtgtactattcgtatacagaccattaacctgacctggaacagttggcacatgaagaatgtaatcataattcattagtaagcgttgattatatttctttaatgcttgcttgtattctgaaatattttcaaagaatgtacaataacggtcgtaacgattcattttattcaaaattgaaatacgaaaagcgttaccactattccaatcatcttcagttgggtttgggttgatatgtgccatgttagctgtactgtacccaccacttgtgaaaacttcagaatatccattctcaaaaacatacaatgttgctttgtggcctcggaattctttacggtactttgacagtacttgaatgtgattacgcttggacttgtacatctcgtaaccttcataatctgaactgaattcacaaattttatcaacaccagccatttcgtatatcctcatttgattaatataggagtattgtacatactccattttcatgtgtcaagctttataatacggaagactttttactaaagattcagacgtattattttttacccatgtactaccgttgtcattagatacgtatccagtaccattaataaatttacgcataataccagtaaaaatgttagtgtataccattattcagtatccttcggtttagaatgcaaaccatacttttcatcataacgatcataggtagtaccattagtactggctttgatgctttcggttcgattgattttttcaatcttaacaccacgataaccaatctcttctttaaattgttcccatgattcacgtagactcatttttagtccccttttgttatttcatacactcacgtaggtcaatcttttctactgacccaccgagtactagatagtaaaaattagaatctttgttagccatattcaaaagatctgctttctgttgaagcgtaaagcgtgaagtactgttacgtactggcatagttactccttaaagtagatatcacgaatttgcttaatcatctctaactcttgaagtcctatcataccgaagttttcttgcactgtcaactgttggaagtacatttcctctaaattatcataaggaatatccactaatgataaaggaactctttcttcactgtataccagatcttcaactaaaaattttataatcataatagaaaatgaatctttattgatatgaaatttgtaaaatgtctggttagtactgaacattgtatttgatggattgaaacccatttcaacaaatactgtatctttatcattatgtgtgacatatgtacatcttgaattcgcaagaactttagattttgggaaataaaaatcacccatcaacttctgtcgtttccaatcctcgtatacaactggatgcttaaccttcttcaattggtgcagtactgtcatagttttttccagtccaatgaatcgaaatcgatttgctcaggattatcaacagcgacaactcgtgcattatgaagagtttcaaagtagccgttccacggtgttcgtaatggaactgtcacatcgccaactttaaccaagaatgaatattctggtgatattgggtcaaaccactctttttgtttagcattttcaacgatagtttcgtgttctttagtatagcaattatcttgcttcatataaaacacccaatgctcttttaggcactgtaaagctgcaactgcttcctctttagaagaccattgaatatcaattgtattaagaacgtcataacaattttcagtgtcccctgtagtgtaatgtacttcaatgctgtatttcattaatcatcgccttttagtaatttacaaatttcaatcatatgataataacatgtattccaaaattgtccattagtacttccaacatcatgcacagtactttgctggaacacatattcatcgttgaacatcattttaatatcatcaatgtaaaattctggttttgaatcattattgtattcaatactcgtttcaccatctggatcaagtgaaattgatgatatgtcgtgaattcctctcggatttgttggataaattctcaacgtaagaggatagaagtctggatcggtttcataagtatattcgattatgtaataaccatcaccagtaattgattgatatttaaatgtagtgtcaattgaatttgagatgttaaatcccagtttctttatctcatgtagatgtgataatattttatgtaaagatcctaaaacatgaatcaaattatcaattttcatttacgatcctttgaaaagttcagtttaaaagttttaccaaattccattgtagctttacccagattgttaatattttctttcaacatttcttgcatcttcctaatactttcaatccaggcttcttcttcgatacgaagaattggtcgcaatcgttcctgaatatcgttaaaacgtgtattgagttcaaccaatgattcatatgtgaaatctttcatatcgataatagtacttctttgaaagaattcttcttcagacaaattacttaaaatgattttatcacgaccaatagataatgtcaattcatcatctttattttttttaattacaatactgataggtgtttttaatgtaatgcaaatatcatgattattaaatgtttcagtttggtttgacattctgaattgaagtttcccagataaagcatgtactggtgatggttgctttttaccagtaataacatcttcccatgaatcgagaatattattaataattttaacataaggaattggcatatatgcacctatgaaaaatccacgcaatgcgtggatttgtaattattcaagtatagtaatttcaattaaacgaatttcgataaactcgttttcagtttcccatgacgtgccaaatttcttttcaagttcagatttcacatcacttttaaattttcccatagtattaggaataatttgtttggttaatttgtcataaccacaataaaacataggtttctcccttcgagatattagctgaacaaaatcttttggatatgcaggtatgttatgcatcacttcatgaatacactcagtacttgaatcttgtactttgtacattacattaagtttacctctgaaatttgcggtcatatcaacaatagttcctttacccgatttaagtaaagttccattctttgaatgagagcaataaaatacctcatcaccaatattaggataatacaaattaaattctaattcagattttacagccagccgtttgaaactttctgtacgttttatataagtttggtatttgtttatgttcaaaagaatatctctcttagtaaatgtgatataactggcatagtccatccattcccaagcattttgtatgcttgtgtcttactagacactttaaagaaatcttcaggaacaccctgtaatttacaacattctactacacttaagtgtctatagtcaatatttcttttgccattctctaatagatattgacgactgatcactgggtcacgaaacaccaattgtcgtctggatttattaaagtactggttacaatcaccacctttaaaatagttagcatctatacagtacgaagcggttctgtcagtgtaccaaccatcttcaataatatcttgaagtttaggtgcattggataatgcaggtggtataaaagcttatcagtactgtaccagtaatatctctgcctgaagtgaggcgtataatgctgggagtttatcagtactggtgtcatctcaagaacactattaatgtattgcttgaaatcttctttcatcttaacattctcaaagagaactttcaagttaggatttaaactttttatgtgctggtagatatcaaccatcgtgtgaaacaacatcccacgtgggtcatttataccaccctgtttaccagcaactgaccatgcttgacaattgtgaacaactatattatttgcagtgtacgtgttatcaacagcaacttcaaaattatatacagttttccattctccagtatgagtgcttgtttttacacctttaacccacgaataatttttgtcataaaaagcttcctcttttttcggttggtcttttttatatgacaaaacataataaggtttttggttaacaactcgattttcaataactttggtattctctggttcagtatagcttatattggaatgccttccatatacgttcattatcaattgttgaatacccaatacacagtttattgatgttgtagtgaatttataacatccactatcaatatgtccatcagcgtcaaagtaaccatcaagaaatgctttttggttttttatgcattctgtgaatagttctgggtgtacttgtttgttagaagcaccctttcccatttgttcacaaaattcaaccagttcttttgaacatatataaaatttatatgaagtcctttctttaacataattatatttcatattcataccatcaaaacatgaaactaattcattaaattcgtcatgtgcacaacagatgaaaactctatattggtaactattggttctattgttgcgttttactttatatgtccacccatcacccataaagcgacccataaaataccagaatttttcgtctttcgttgatttgttagattcaatggatttaacattacacagaaaatggtcatatgtcaaatcatgtgcctctacccattctggttcagaaaaatgacgttcatattgtctaatgttgttattccacatagacgtcatttttcttgaataaaagggatgattatcggtacattcaattggaaggtgaccttgacctgtaataatacgagtgggagcatttttaacaccagtactcaaaactggatgatatttaccagtatgtgtcagtaccatgtcaccaacttgaatgtcttttatatctttatgacctttgtctgtcataatcatggttcctgctgggaagcatggaaatccacccattaataaatctattttatcccactcaatatcccattctctccatttagttacatcacccaattgggtgatatcaggaaagttagcttgggattcagctattgcgtacttgtcaatttcggatgaataatatttttcaacagggatgccagcatcttttaatgccatgtatcccacactcatcccattaaaaagagatagtactcggataggtttcatataaaatcctttttatattgttaaggtactataatatattatagcatcttatttagaaatcttccaaacttttttcatcacaccatcgtgatgtacagatgattgcagatgccagaattgaagcacttgcacgtcctccaccgagtaagtactggctaattacgccaatcatattgaacactttatcatactcggttagttgttcaaaacctttcttccaatgctgatattcttcttctgtgacattaaactcaccatcaagttcatttaaaatctttttaagcacagcactatgttcactcatcatcatctccatatcgttcgtcataaaaatcatcatcacgatctaatggttcttttggcttttcagacatatatttcctcacatggtaaaggtattatcaccatccatatcttcatcagttgcttcagctaatgtcttgattgtaagtaatccacgcttcacgtacaacatgaagaccttttcataattaccaaacataatctcaggtgacatgtaattctctgttacaatgacgattggacggccctgtgaaagcatacgaaacatagtacgatatttgtcaaatgtgcgaaattcatccatgttcatcatgtggcgtttacgaactactttagtcatcttattacctttagttaattgaactctacttctggataatgattatagaacatctcacgaactgcgtcaagatgttcttgaaattgttttatatcttctaatgatggtgcatcaataacagtactaagttgaaacaacgattcttctgtgttatatagtgacatatcaaatgagttattgttgtcatcagttatgatattatcacaaatttcgtatgtgtcaatacaaacatcatcaagtgttgtattatcatataccgtgtatacgaatacaaaaataaaagaagaatgttctttaccataacgcggtgggtcatatgtcacatagcatttgtggtcaaatgtatcgagttccatagacaccaccccagcttcacgatattcattagtttcactggtaagatccggtattgatgttatcgaaagtaagtggagaaatttacttggatttagcatttcaccaccattggattttgcgactgtatattaaaaagggataatacaaaagtactcaatttttcgaaacaatctactaatacatttaactcatcataactaacaccaatttcacgaataagcgattgttgaaagaatccttcttcggttaacgataaactactaacctcagttatgttataataactttgggatgttgtggttgatattagttgtattgcaatcgtatctgatgttgtgttgtacagatataaatattttgtttttctttccaatggatctatacatgaaagatcgatcatgtcataggtttttccaataaaaatattacaatcatctgacaattcacaacaaatgcgtatatgttctttcgggtcatgaacacgttgtgtgtcaaattcacatgacattgcaatttcaaaatgattttttatttcgtcaacattcatctgcacccaccattaattcttatattcgtatagtttaatgcttttttaacaatattaatttctgtaattcctattacatttttctcaatcactgacaattggaatagttcctcttcggaaatatcaatactgtggattcttgtacaataattgttgaagtcatatacatatcgtattgtatagtcgtttatagaaactgatacaattgcaatcccatcatggatgtaagttagttcatttgagtatctattaaaaattaacctatctggtgaacctaatggtagttgaaatgtatttctagtatcttgaacaataacaaaatcatcatctatatttttactcagaacacccaaaatatcatatatagtagtcatgttattctttaccttcagcagttctgataattttcataacttctctggatagtgcatatacttttttatagtgctcatacgttactgaaccaacattattaatagtactttccatgaagaaagtttcttctgtatacagttcatttgacaatgcaaccagttcttggtgaaattttgagtccttccaataacgaaattcaaaaacaaattgtccgtcatgcccgactctacaacattcagaacgatcactgtctacacagctaatcacaatatcactttctgaatcataccagatatttcccatatttgtttcaataacagcataatcaatttttgtagaattgggaattaaaccttttttcaccagcactaaactggtattgtcaatatctagtaaacttaccatatcaattcctcattactaaagtgtttttaatctctaacaattcactatacatcttcttgaattgtaatatatcttcaaaagtaataccaccaagatcatcaactaatgaacgttggaataaagattcacttgtttgtaatgtatctaaatcggtgatttttaataaagaacttggattaagtgtttcgactagtagtatgtttttgtatggtacatatgtgatcttgatgttctttttataattaatcttataaaatcgcataattgacgattcatcacttagttggataattgggtcgtcttgttcattagaccaccatacagtactagtcatatgattgacgtggtggttcaattctgatatgttcaaatctaaaaaatattttatttcattgtgtaaatctaaactcataaatttatcctcaatgcagcatcatcatgtattgtaggataaacccacaataatgtcaagatgtaaaataattataccagtaatatagttcttttaattcttcagtactgaataatacttcttctattgtagattgttgaaagtgatattcatcattaagatacatagaaatattactatatactttcctattgtattgacataaaaaagaagtttttttattaatgtattcagtaaatgttaatttatctaactcaatatcgaaagataatctaataatattaatattatcatttacatacattagtttctttgaaaaatgatcaattgtaatatattctttgtgagagaactgaaatatattattaaattttttaccatttgtgcttctaaatttttcaaggtaataagaaagtggtttaattattgaagttccaatattatttttcatatatactcgaattttagataataaaaatgccccgaagatcggggcagtactaaaatgattttgtaccaaaaggggaataagaacaaaatgaaaatataataacgcatcattattatgtaagggaggaaagtaacatgatatgttaaccatttctggtatatttatttatcatttaattctttaagttgggtttgtatatctttagttatatttcgaattttcttaaagcaataaacactatcgtccaattcgattttaagttcatgtgtaaatgcatacagaagttcagcaaatactaaatcttgtcgcatccagtttccatctttatataaagtcattacacaatatgggcattcactattagaagtttgctttccaataaaaacactttgaattgattcatgcttaaagccaataaaactttcatttatttttttaatttcagtactgatatcgaatttagcactggtgttgattgcaaaaattttatttccactttcatcagtattgatgttgagttcaatatcactacctagtttacgtactgctagagtataaagaagtaattcatacatgtcgtaacttgttacattaccatttggtgcaattacatcaacactaacaccgtgcatttttacttctgtattaaatccatctttatcagaaagaaaatcagtgatttgctttgtaaggattttaatttggtctatcatatttcatttccttgtgtgataaaagcctccatcatggaggcttttgtatttacttagagagattcttcgtattcagcaacaatctcaaccatttcattaatgaacttgatgtgagaatgtgtcactgtacggaagtcgtaaacaagtgactgttggaaaaatacatcttcatcaagagaaccatcaaagttcaaatcaatgttttcatcgtcattgcttggtgcaactttaatattcagaagattttcatcaactgcaagttttacaacacaacccagtgcaatggcaagaacatatgctggtttcttagctttttcattacggaatggtgcacgtagagcacaaaaagtactgctaatctcatcatttggttctttgtatttaacattgaccattagttcttcgattttgacgctctcaataacacgaccagtttctggagcgaagaaagaatgttcacggatagtttgttcgatattcatatattattccttatttagattgctaaaaatacgaagattgcggtttgctttaaactgtttcaaatcaccaaatctatcatcaacgatgaaagttgctgatttctttgactgacatattgtacaaatcaacataccttgtattgtatactcagttgagcaatttgtacagtacttttttcataaagttcagtactcataaaaccttcacatcagtacgtttttctctttgttcttttttaacctcatcagttctagtatcttctaattgtaacacaacttcttttagaatgtcaacatcaattgttgcttctacatattgatagtcgtttacaccaaaaacatactttactgcaacccatacacggttataccattttaaaaaggatttaaacgcatacttatcagacattgaccaagtttatcatctccatattcctctgtcaagtcaaattgtgcaatgtgaacgcaatgctccattttatcgccacaagaacaacgtaaaatatactctttactatcttcactcatactggataagcctttaaaaattgtttaagaactccaaacttagatgaatcgtaatcgtattgatagttaagctctcgcttatcattcatacgatacaccatatgaaaatttggataaccaattctaacaggttttttaggattagcaagtaaaattgcccattcttttacaggaaatacgttttcagacagcattttgatatttgtttcaaaatacttcatggcttgctttccgtgcttgtaatcttcttcactaatctcttgacaatcaattctatatgtttcggtatctaacacccattgttgatcttcggtatataaatcaattacatcatcaatagtataactatcaggtaaatcataaaatacccaatgagataaaccagaacttacaccaattcgaattttaaagaacttcattctttatcaccttttacataattataacacacgacacagtgaattacaagaagaattatttccacaatattaagagacaatacatgactctgcggtgtgaaaagtgccaataacaacattatagcaggtattgtgaatattttccaagtttttttcattttattcctttgtatatgcgtatggtaaaaataaaacctctgcattaggaatgcattgtgccaatccttcaacaatagatttgtttttattacattgccaaactttagtaattttatgtctaaatacttttttatcaacaacaatccagtacatgtccattttaacagtactgttatcagatggtgttagtaaagtatcgatgtcatatgtatcaaagattttgtcgttcatataatctcctaataaaatattctcgattctctcttatatacccagatacacagttagttgtggcttggttagtgaatgaaatctcactattggacacgccatttgcatcacacaaaggacatattcccatgtacttgggggtcgggtaggtgtccaatttgtatttttcattacataccatgtactgttgtggcaatacatctaatattatttcatattcttcatcaaacaccttgaagcatacccaacatttacccatcatagttttcctttaacacagttcttatatattcgaatgttttaacaaaccaatcatgttcgtcggatacatctacaactttaccaccatatacatagtaatggtaaaaaggcaacttgctttttcttaatctttcagctaactctggattttgaattatcttagcacaaatagcatcttggattattgagatacaatcatctgtcatttcaattcgatcatgcatatatttgttagcggcggcctttgctgctgccccagatacttttctaaggtcatcatgtttttgaccagttaaaaaccaaaagtaaaatgtttcaactgatgggaaccatccatatggttcaagtttgaagctgtgcgaagaaaagttagatagatctctacctaacttcgttctggctttactataaatgttaatatgtcggtatccatcatcagtagggtcaatgaagttaaatgactcttctgggaattcaaacataattattcttcttctcctgaaggagttccacgtagtttatcaaaatcaacccaaataccatgctggtttttaaatcgacatttctcatagtaccaactatagtctgtttcaacaccttgtgaaatagaacgtacactacaatcatacatattatataaatgttccctgacaatatatgtattaatcagtacaacgaataatacaataataccacagattttaggatgatccataatcaagtcaagtactgatctagtttcagaactatcaatcttacttctacaaatagcaacaattttaagaacagcgaatgataccagtaacgaaattacaataacactcaaataaattagcataaattacactcctacaccaaaacgtaaaataatattattaacaaacactaaatcaaaaggtgactttggttcagatactgagtactgaaatgattctgctgcgaaattttctctattataccatgtttcagaatttattagcatttttttatcaccaatcgtcactgaatgtaatggaacatttgaagaagaatttattgaatatgcattaagattaccattttcatctaatgtgatactaagataatattttttctcaatatcaggaataagttcttttgtatacgaatagattgaatcaacccattcatcatgtacattttctgcaccaatcaggtgtccgaatgataaattacgtttaactggctttgatcctggtcgagttagaatgaattgttttgttaagtaaaaattattatgttttacttcaatattaacatttttaaaattcaccactttatcatatacatttcgaaaaactgttatatcccaagtactaatttcatccataatacttatcaccagttcttctagttcttgtataaatggcaaatcatcttgatgaaatctagtcatggtttttcatatacctttttcaaattcataatttcaagaatgctgtattctttatcaccaatcaaatcttcagtgaatgcagtggggtcggtatcgctatacaacttaccattgatgataacacaaccattactaagatacaatgcactcatgatctgttgtccttctttcacattttgtgctagacctgtatttgttactacaaatccatttgttgctaatgatgatgttagttctgaccattcaactgatattaagtcgcgatagtccttagatacttttatattcacaatacaagcaactcgtttaataggtggagtgctaatcgtgtacatttgtggttgttggtaattagagttgtatgtttgtggtgttttaacagcagttcctgaattttgagttgatttggtaattactggttctacactggggactgttgttcttagtgatataatacgtccagtttcatccaatttaaggactaaacgatgagtttcatcctcagagtaatagggaaataagccgccggaattcatattttgaagcattttaattaattcataagtattttttaaaaacatagtacaccccatagaaaagggagtacaaagtactcccaacatttaattatagtttaattgattcttgaataccagtatccattgctttcttggtacgtgtatcagatactactgtacaaaggtgttcaatattttcacttggaaacgtattcgaatcaagaattttggaattccagaagcctttgcggaacttagcataatcagtacactggtcaattttcattttctgaagattgttgaactttgtacgtcctgtttcaattgtcaccatcaattcctgataaattttaggatcaagatttggaacctgttgttgaatctgtgacattacaaacttctggtcaacaccttcacgccctttaaagtatgattcaatcgtttctttcaacgcatctttatacttatcggctacttgaaccttatcttgaatagtaagagtataattgctaagttgactttctgatgcatcataatactttttaatgtttccttcaaactcaactgcacgatcatgtgcaccaacatacatactaatagaaccaaacaccattagtacgataactaccaaaataccaattaacgcaaggagtttaccattcataaatcgttatccctcatataaaggccaataaaaatagacagaatcaacaacacaatggaagcaccgataagaacatcttttctaggttccattttaactgacaagtactcaaactctttattagagagtctctcaaaatgtttgtcaatattatgtacttctttaactagtaagtcaagagttaatttttcatttaatgcatcaatacgcatctttgcatgtaactcttcattcttcattccttgtgcaaatgatgtactgttgaatttaacaacgttaccatcattgtcaataccaaagaacataataacatcattcttcttaccaccacgccacgatgcaagggtagcatcaacaaaatccacatctttgtaatcatatactagtacttggatgtttacctgcttacgtgcacccatcgtttttagctcattacgaaggtattcatcgtaaccatcaacgttgtaatttgtagtgttaattacgtgatgtgttttgtaataatcaactacacttgggtattctggaatagtactaagatacttttcatcatacatgttgtgtagttcttcaggactaaacaatgagttcttatcagcaaatagatagttgatatatgaactctctgctgcggcatagtcaccaataataacttgctgccaacgtggtggtgtcattgtaccttgacggttcacacgttcaatctcaaactcacctactgtacttttcacataccaatcaacttcatatgagtaatcaaaaaccttatatgattcacactcacgatgtgatttacctttactatcatatcgcgtatggcacttctcatgccatgtatagtgcttacatgaactagattgtgtgcaatattctttgtggctgtattttgaagttacttgaccattcagaatctcaacatcataaagctggctatagttgattgcgtatgaaataccaagaacaagagccgcaccaaccagacaacaaccaatatgaatcaatagttctttagtactgatatgcttatcgtacatgtatttcataacgaatacaacgataagagcaggtattaacagaataatgaaattcatgtattaatccattttaagcttgtttagacagaatgaaatctggattgcttcacgtgctgcatcaaatagtggatgatgtaactccaacccattaatcccacacgtatttgcatatgtgataaatttatccaactgtaccgaaacgatttcatccatttcaatacgagcttcttcattcaataaacgtttcaatgtgcgtgcattttcaggtgcatcatacttccacaactcaccagcgttcattagttttaaatggtttgcttgtaaaatactacaatcgaagttacatccgttgccccagactgaatgagaaacttcttcaccataatcattgtaacgtaattctttccagaaatcaacaatactactgtatgcaaaaaatcgtcgtgattgaccattcggtccatacagttcaggtgctttgagtttcatagtactggcaacttcagcatatgcattagggtattctttctgacatgtattcatccaaaaatccattgcacctgcgtctgattttaaaccagtagcaacttgatcctggtatggtaatttaatatataagaactgacgaatgtcattttcaggtttacttggaactactactgctgcgtaatttgggataataatatcataaccggaaagttcaggtgttccaagagcttcaatatcaacactaatatgacgacgtttcataagttagttccttatctgtacattaaaaagagtgcgttttcaataagattatattaaaaacgcactcatatgtcaactattacttgttagctttttcggcaatttcacgaagagtgtcttccagttcataggaaagttgtgcaatttcctgtttagcacgttcacgttccaatttacctttttctcttcttcaataactgcttcaatactgtcaatcatcgttttatgtacattacgcaaggttttaatatccacaataccacggttgtttgcctttgctgcatccaacatatttgctgcaaccattttagagttagtttccaaaagacggtttgtctcattatcaattagattgcctagttcattatccttacgttgacgctcggaaatcaactgttcagccaattgagacttccatgctggaataacaacggattttaaatcttcaaacttagaaacagtgttcaagtttacttttttcatactcatcaagcgtggaccacttagttcgcacatcatgataagacgacgaatcttatcttcttgtttagaaagtgcttcacaaatcatcttttgctcttgaatagcaaaagagtctacatttttgtctgcttgcatttctactaataatgcatcttgtgttttagtcacttcttctaaaccaactaatgtatcacgcaattcaaacaaatattctttgttttcattatatgctttatcaagccattcacattctccgtgctggcgattaataccagtttgaagagttttcataatttcgtcaatttgctctttactgtttttgtactgatcacctactttctgttgagcattaacaaagaatttcttaatacgaccaacaattgatttatcttcttgaagactgtcaatatcaactgcacgagtcaacgtaagaattgtggtgattgatttaccaaactcggtattgtcatccgttacattaactttagacataatttcatcagccaaacgcccaacagcagcaccagcagttgtaccaacagtattgatgttttgaactgttagagacatagtatttcccttaacatctttcagtactggtagtgattttgtagtttggttaaaaatatcacttgcatcaattgtatgacctttagtcgcagttttagtagtacgttttgctgatttagctgcggtggatgcttttttaggattgatttctttctcggacatttagtattcctcgtttaatttaatatgatgtgctgctctgtgataaacattatacgggcagcacgtatgatagtcaagtatttttttactctttgttaccatatgccagattacgaataatctctacagtactctcatctacagctttacctgtctgtgattgtaaacgattgataatcaaaggaatagtaatagtttggatatctaccatacgattcatatcaacttgatattgcttacttgttgcaataatgctcgtttcagtcatggatgtggtgattcccattttcataatacgttctaatgttaattcatattcaaacgcatcatccacacaacgtagtgcgtattcacatcccaacttcccatattcaagttcatttttgatttcatgaacttcgtttctaagttctgaaaacatggtactaagaccactaaacttattagtatcgtacttaactgcttcatttagtgctttcatcacttttggcaaatctgatggttgcactttgatatcagttttaccaaacaatttctgcgtaaaggtcggcttcaatgggaacaacgtttccaacgcaacagtaaggttattcataagcattctaatataatcactatgctgttgtaatgctgagttaagatccaattgacgttctgaaatttgttgaatcttagttccaatttcttgtgcacaaactggtaagtttacaaaccagtctagtacttttactgaattcttttcaatagtactagggaattcaacccatctttcaatgtcatcaattctgctatcgtctgggttgataggttttttcttaagaacaataggtgcaggtacatctggtgatgtttgtaccaagtctaaacgtggtttggcacgaccttctttccattcacgatattcacgctctaatggcggtactggcatgttaggatcaattctaatattactaaaatgaattttatccttcattaaatcaagaactttcagacgtttattatcaaaatagatttcatctaatgacagagtttttacatcaaataacggattacccaatgagtcataggtgcggcgaacaattacattataaatgtattttttgtttgatgaacggtcatattgtttcaataaagagttcagtacataattatagttaaattcttgaatctcaacttctttgccattttcaatgaaaaaatatttacctttcattataaaacctcataatcaattaaaatttacgcgatggtgatattgtacatacttcgactacacatgtcaacacctgaaaagaaaaaaggacgcaccttagtgcatccttttgttacttttatccttgtaccatacaaatgtcttgacaggtggatatttttcattctttggtggttcaggcatgtcgtatacagttgcatttctaaacttaagaatgtatgtgtccattaaacggattatacaatagtttaaacatttttgtgctctttctttccaaaaatgtttatatggttctggacaaccaagataatcaagtttatacatactcatagcaacttgcataaatctttgggccgagaattttcgcttatcaatcttacttgctctgtgttggtcacatgtccaacttgatacaccaggcaagtgacaaaacaaatcaaaactaaccatactatcaaagtatttgttatgaccatgtaactcaccataaaatacagcttctgacacagtatcatataatgagaaatttgaatgtatatgttcattatcaaaaatactttttaaatctttataagtttctggaacaggtggctcaggtaatacttcaccgaatacttcaacacaccatatcttccataaaccttttgtaaatttattttctaattctctatcactatcaatataaaaagttttttcatttatgaaaacttttctagccatgtatgctttaaaaattgcatctggatcaatgtcttcacgatttacatcatcccagcctttaccaattcttgaaatttcaaatctacgcatatacatacgacatgctaaatctttagtaaggctgcgacgatacttttcatcctgatgtaatttggttgtttcgtgaagagatttaagcatatttaaaattctcatcgcaacaccaaatatttcccgtttcttccaattacatattgatcaccacttcgtagtactgtatagctttcccctagtatggaactaagacgcgaagtgtctaattgtgtatcattctttaataactttttcacatatgtttctgaaacaaaaccgcttccagtactgtagtgtaatttaccatatgctgtttttaatgtcaacatgtttccttctttgattactgaaacaccagcataatcaaggaactcactaattgaactaggaatgcccaaatcaattctctgctgtatttcttcaaaatcaacatcgattgggtcattaacaccatatagttgtattttccaacctgggtctggacaaatattttcaatagttttaattaaacgtaaaagtttttcagggaattcagcatttcgttccatttccacataaacttgatatcgaccatctaaatttggtgtttctgctgcttctgtatcaactacatcaataggtgatttttcaataaaagaagataaatcatatgctgcatcaaaattgttaagaacctgaaacataataacaatattactatcttcaattttaggagtatattcatcaacactaattataggatgaatcaaatctttgagaacttgcggacgtaagccttgttcatttaatttctttttcattacattccaccttcttgtgtctcatccgttacttccacatccaaatctacatcatcaccagttacaggttcttcaaaattttctggtgaattcattggattactattgaattctgctgccattagtttatattcatcaaaactttctggattaattaagtttcgtggaatctgcactctaaccaatagtactgggattctttcattttttggtatacgtaccgatcctgattgtgtcgcaacacttttcatatcagcttgtcgattaggttctttgataggagttatttcataatcagctttaacatatactttagttccatgcttctccaaaatagagaatgctgtaggatcagggaagttttcacgatagtatttaaatgttacagtacaccaatacttacttacaattggtccctctaccaactcaccctcaataattcctttatacgcatacaaatcattatcatcgaaatatttttctacagcaagaagtatatctaacataccactgttatcatacaactgctgaatagcattatctgtataatctaaatcgtccatattttatattatccttaaaaactagcacatataatactatttactacttttaaaatacaacaaaaggggtttgaatcaaaccccaatttaaaagttttatttgtaatatttacctagtactgaataaattttcaatctaagatctgtccaattctcaatgtattcaaaattaccagtgttcttatacattgaattatgagaacatcccatcataactgacggaataccaagtcccattgcagtttcaatattattgatataatcatcaatcataagttttacatcatatctagactgtaaatcctctagtgcttgtttctttgattcgttcatttcgataataataatctcatcaaaacagttttcaccaaattcacgcattaggtttacattacgtaaaacttctccataaccttttttgccacattttgttagtactacaaatttttctttatgaaaacgatcacgtagctcttgtacaatatcaactgtattaggttcgactggttttaacaacccaaacaaatatgattgttggttgaattgttcaagaatttttttaacttcttgttgggggacacccaaccaatcggataaatcatattctaatgggtatggtgttgatggtgtgatattataagtttgttttacgaactcagaaagcatacccatatggtccaatagaacttcatcacaatcaaaaactatacaacgtggtttcattacatgttccccgaacaaattaggtcaatctcgcacagaagtgcactgagattcatttcacggtcagatacagttgcttgttttacaacagcatcacgaatcttaaccttgattttcataagagtaatttcatcagtactgaacatttcagcattacgatacagataagaaaagaatgcatccatctcatcatcagggatattttgtacaatttgttcacgcatttggcgaatgtttcctgcctttaatgcttcaacaattgcagtacgataccctgctgaattttcaatactatcttcaagttttactagcttaccatcaacaactgaactttgcaatacgtttagtgttttacggaaatcaggataggaagcattgatatacttttgaacttgttcaacactatcatcactactcaaatcaacaccttctgctagaagaatattataaattcgagtcatgaattgttccatatcatgcttttcgattgtaataacttgaacacgagaaatgataggtttttgaattttatgtggttcgttacttgttaaaataaagcgagcgttttcatggtagtcttccattacacgtttcaaactaccttgtgctttatggttcatctgctccatttcttcaagaacaaagatacgatacctaccaaaacatgatagctttgctgcggcatcgattttatcacgaactgcatcaataccctcatccgacatgttaagcgtagtcacatcacttgggtcaaggtgtccattctgtaccaatccattaatgagtactttgatcgcagatgttttaccagttcctgctgggccaaaaacccaatatgtggaatgtcaccagttttaatccattcttccattttctggcgtagtgcatcattttttgatacataatcttccattgattgtgggcgatatttttcagtccatagtgtggtcatttttatttccttatgtgtacgtgttatagaatccaatcggctgaattatataataaagccgtgaaaagttcttctgtcatttccaattgatttaataaaaaattaaaagaatttgccttatttttaatcccagtactttcagcttgggccgatgcaactaataaaactttaaacatatcatgtgaaacttcatatacatattttgtattttttctatcttcaaacatgaatcttccgttttttgatactaatgttacatctttgaaactaaattttccatcatccgttatcatcaaaatgtgtccaaataaaaagcccagatattaatccgagctttaattatattttatcaacgtccaaaggttagcattttagtgcgtgggtcttcatcagatactaaactaacagcggcagggtaatcaactaggtttagttcaataccatcaacctcaatcgttcttgaccaacgaccatgatcaattaaaatccattgaccttctttaatatcagtaatgtcttcgcctactgaatatactttagcccagcgagaacgaatacctctaattttaccgtcatcgtttgttaaaacgattccacctgctgttttgcgttcaccatgttccagttcagtgactagtactttacctttacatgcagtcattactttattagacatttaatacattactcctgatctttagtttttgctcgacgtggggctttcttctcttcagaaacctcagcttcttgtgcttcgggcttaacttcaaaactttcatcatcccatacttcctcagaactatgttcagtactatgaagttggtgttcagggatataatcaggaatttgcatttctcgttctttttcttgtatcaactcttcacgagttttgataattgttccacctgaaccaattttatcaccacgtgcgtttagattagcattacccaatgctacctgatgttgattttggtacttgagcatatccatgtcaattgttgtaccacgataagttgtatgtttagacatatcaaaatccttttattgtatgtgtgatataagcctacaataaacattatatcacatgttttgctaccatttcaaaaattcattaacatcgagttcgtatttcaatgaatctaccatgtgtagaccaatcaaaaacaaacagtatgatgcaaccgagcttccacgccctagaccccaaaagatctcattttcttccatataatcaacaagccatatcatacatcttaatagctttgtcatattataatattcatataaatctagttcatactcaacacgctttcgtgcttcatctgatgtacatttttgtaagaaaaagtcacgtagatttatattgtcgtatactggatcataacgccaaagttcatgatttttatcatgctcgatagtataatccagcatacgttgttctaagccaaattttttacagttatcattgaatttcaacctttcaggttcatcaatttcctgcaattgtaagtactggatatccgcaccgcaattgattgcataaactactgcgttaagattacattttacatcaccattgggacttataaatctgtttccttgtactttcatttttctttttctgggcctcttcattgtcagttagataagaatccatgtcgaagatacatgagtcttcttcatcataaacagatttttctttttgtccttgacgaagttctagttcagcataacattgatttaacacagtttgcatattaccaataatcatatcactcataccagcggcacgggctgaagttatacgcattgactgttcattaattttcaactgtagttctttctccgtcatcccagacgggtcaaaaaacggattaaacatattaacctcctatgttattgttttgcaatgtaatcacaaatgtatctggtacataatttactgattcatgtgaaaagtacccaaattcgacagatgtgatttcaaactctagacctaccattgtaccatgttcattattctgaagtaaagtgttgaaaaatgcttcacctttacctggctgacaaaatgcgactgggataataggcatgaattttttctgtataccatcttcaatgtatgggtgattcataaatcttggaacggtatcaagcatttcatcgctgatacttggtatagcatcaacgtatagaccacgattttgtaaatcagttggatcttttaccaagtttgttgtgtcttcaccaatagcttgaaagatattttgacgtagaccaaacagttcaccaagctgaccattatctatttgagtatacatacgaggatttttggatacagatactaaagaaccttcaggtaaaacttctctatataataaatcatattgcaaattgccttgattgtcaagtgctgatatcaatttataattacccattaccattttaaattttccatttggtatagtagagccatttggattaatgatactatttcgtaatacttttttgatatccgaaagattagtatatgggtacgtttgacttagaaagttttctttcaataacatcctaggaactttctgaagaccatacctattatcagattgacggaaaaaagttgattagtaaatgatgaagtactgatacatttaaaccactctcgctcaaatgcaacagacggtagtacatgtgcactcaaataattctgaccgaaccctcttacaatcttaaggttaaatattttccttgcttcgccaccttcagtactaaatgctttaacataaaacgatagtttaatgtcatcgttttcactaaagtcaatacttttggcatatgcagttccaacaagatatccgtcaggtgtcaaatctattccatacttcctaatatcatcaccaccatccaaaacatacgaaacctgttttgaactatcagtttctattctaggataggtactgtctccaaaatattcaccaacatgtatagttcccaaatcactatcagtaacaaagtttatattattaccttcttcagcgttaatcaaaaccctgaacattttctgcataccaatgatattatcaccaagagtagagtcataatatcccaaatcaatccaatcactactatcataaactggtttaattgacccattgtcgtactcaccactaatcacatagggatatacaacgttatcttttaattgatataaatgattcggtagtggtttgtcagctatagaatatatagtgtcaatatcttcaggacaaacccacatttgatatgccttatatctttgattgatagcaaacctttcgctttcttctgtgtatgtacttaatatatcaacaatttcaactttgaaatatgcatcacacgcatctgaatcatataaaaatgtttgtagtaattgtccattagggttaaaaaccatacctgaatcaattaaattaccatttctattttgaatattaacttttacttctttgtttatgccagaaataggccatgttggttgtgctggtttaaatacggcataatcattagtaatatgtttatctggaacttcagatatatccatgtcaatcaaacgatatgcaggaaagaatacacgaggggtaatatcggtagtcatgtcagtaccgagtataaaaggtcttcttctcccaaacccttgaacaaacaatgtactgtttgaaccatactcaacatcaccaatacaataaagttttttgtcatcaccaatctcaactccaggtgtaacccaaacttcctgactatcatatgttattgaagtatctgttaatcctaaaactccacttggtgaaatattcccaaaatacataacatttactgcttgtaaataaaaatttataatttcagtattattatatgttccgtcatttttacaatgaatttttataaaataaacatcttcagtattagtacttgatgataagttaaattctgttttgctaatcttacacttatgcttaccatttactagtttattaccagttgttccatctgaaataggaataaaactattttcgtcattaccaacataaaaagtataatgtggttctggatcaaatacagcacctgaactatccaagcattgtatattaagaatcatctctaagtattcatcttcgtttaatacatagctatcatccgttgtgctttctttattgatactcaaacgcacaagaatgtcttgtccttcttgtatatatcgagcatcggcttttatatcccaacgtggggtaaaagttgtcattataattctccatagccaagctgccattatctatagattatttatataaaggacaaggaagacccagtaaggtcttccataaaatatatcaattgtctgatttaggagtaaaatcaatctttcttagttctttaagttcagatttataaatgtcccaaattaggtcatgattagataatagttcattatacttatccatcaaatcaagattatcttgaatatcttgtagtactgattgataattatcttgtgtccagcgatatgatgggaagtttacaatgctttgaatattctcgtcagttgcttcaatttctgcatttaatgatttaacaaattccaccatttctgcacggtttgcaaaccctttcaccttagcaatcatatcattatcaaagcattccttgattagaattttgtatcgaacctcagccgcacaatcatcaagtttcttttcataacgcttgatgtaatacttgaaacgaaaatcaacgaagtctttaatcaaatccattgttgtatcgtaaacttttactttaccattttcaccaagaacagttaaatgttgagtcatttttttattaataccaaaatactcaataacatccatctctgtccatttagctgacgtaccacgtggaagtttaatagtaatatcaatcacgtcagtactatcattgtcataatcacgaatctcaccatcatcactcattttgattagtttttcaatgaatttctcaatactgtaattaggtggtaatcctgttactttaactgtgcttgcatcaataacctcagctttaccatagaattcatacttattttcatcaagcttagtcacaacatcacttgcaccacatgaaacataatatggggtcatttcttttagtggttttttatcaatagcacgaatacagttatcaataatatcttcaattttatgtggtagaattgtacttttatacccaacagacatactgtcattaccaaataatgacaatgggataataggcaagaagtgtactggttcatatgttgtaccatcatagttttctttcattggaataatatcactatcacgcaaaactaacatttcagtacttttattctttttgacataagtataacgagcagatgcgggagtactgtttacttgtgtaccaaatccaccacgcttgccaataagaggatagttgtttgcaacaggagatgctaggttctgaagcgttcctgatgccgaggtatcaccatgaagatagataccatcactaatcattttacctgcacatgatacagttttaatttctccactaattttagatagtgtaaaaattgcttttcgttgtgaactctttagtccatcaattccaggaatagcacggtctagtgtatacattgaatattctagtgatgtggtattcacataatcagaactgttataatctagtagagttattgtttggttatcgatattttgattttctgtttttttacttttagccattccattgtctctttgtaaaaggggaacaccatgttccccattaatctatattattccatccagttcttgcgatcatcagcacgcttcttgttgaaaatcaaatcaagagtttcaccaagtcgtccgtcatcagtgatcgctactgcaacactattagtgaatgcatcacggaagtttgctttttccaacgtacccaatccttttgcacgggttgctttccaacctttccaatcatctggattatattcatgtacgttatgaccatagaagtattgtgtttctttacctttctcaagaatgataaacggggttttgaaaatatacacaaatggattttcaggatcttgaaacaactcaggccagaatttgaataagaagttacacactagtgcaccaatgttcttcccgtcctcatcttcatctgcacaaatataaagcttaccgtagttgagatctgcacgttcagctttaacacctggaactaagttgatactagccattatatcatgcaatgccatcgaatccattagttcttttgttttctcagaaccactaacgttcataattttaccacgtaatggtagaataccatgaatgcttggaatacgagcacttgccatgttggaaatagcagagtcaccttctgcaatcaatagaatacactgtgaacgatctgtaccagtactgtctagtagttttgctactttacctttcagtagtttttttgcaaggcgacgatcttcttctgcatctttcttgttagttcgtgctgcacaacgttcaaagatttcatcaacccattctttgtttttcttaactaaatcgtcgaaccattcagaactcatcgcttgctgaataggacgaatgacattttcattagttagtttagatttaatttgtgagttgaaagatggagctttcattgtcgtcacgttgtaaatcaacaatccttcttcaatatcagaacggttgggtttcatgcgacgttttttgcttctctttctaatgcagtactaactcctagtgagaagaactttttaaatgtatccaaatgtgtaccaccatcaaaagcaggtgcgttattcactagaccatgcatatggaaattagtattcatattggatacggcatttggtacgatataaaacgtactgttgaagttgaatgagtcatctttaacattcaactgcattagttttggtgcattgaataatgccttttcagtattacctttaataataatacgtttaccattcaagaatattttgtaagttgggttggctgctgccatttctttcagaatactataaagtaattctgtaggtagttttctatttgggaaaacttctttactcaatgtgaaacgaatagtggttcctgttttatcagtttgtactttacgaatagtaggttcgtgtacatgaagttctggaaacataattgtcccttcttcaaacttctgattgaacttataaaaaccatcataaccatcattactactttgtgttttataaggacggccctgacgatgaatttctagttcagccttagaactcacaatcatcgcaactgaaccacccagaccattctgaccaatcgtttcgtcacgcttagaatcatcaaagttacgacctgttttagtttcagtcattaccatagtacaaaggtttttctgatactcaggtacataatcaattggaataccacgtccattatcactaatttcaaatgataattcttcttcattgaaatcaacttttaaaacaggttctttggttcccgcttttttaaattcatctaagctgttatcaataatttcacgtgtagcagtaagaattgcaggaacccattctacgttcttaacttcatatccagattcaccaaatattagtacttgactttcatgaactgaacgtgaaccaagatacatctcggtacgtaaacgagcatgttgataatcgttaagtcgttgaacatcatgttcctgtagaacagcactttctttcttagccatttgatttccttatcgtgtctctttgtcctaaaacattgtatcatcaatgtcatttttgtctcaaaaaatatcgggacatctagtcccgatatattattttactaacataagtttaagttcagcacttggacttgattcatcatcactccagtacttatgaactttatctaaacttgcctttgcaagaacttcaccaccacctactatgtagacttgatgtgagccaattagacgtgtccaaaatttaattgcatcatcggtatgaagactgtcgctcagtacttttacaccattagctaccatatccataaaaatattatagatgatacccttagttccggttttagaagctgtggcggcaatctgaaacacattaggaacaccgagtactgcatcattagataaatgtccactaacgatagcaagctgtttacccgccttatcataagcaataaaacctgtgccatgcttattcatgtaaacatcatattctttatgttcagcgaattttaccatatttttcttaccagtcatttcagcagttttatcaacaaactcatctctgtcttgaccttgaaaactatcgaagcgttgtggcatttcatccagcttatctttttcatcgtcacatgaatccattatatcacaagttctgtcatctgtatcagctagttctgcatcttgtacaatatcaaccaaactacgcatactagattctttaactttatcagggagttttgatccttttttaagatttccttccttctcatcagcagcgttccactcttttgctgcactttgtgaaatgcccgcttttttagcaaattctggattatgagcagcggcagcgaaaaacttcgcctgacttttacttttacttggcattataaactccctaagtctcttctcatttgaacaatggaaacatccctgtccaatgtttttaatagtttttctggtgcttctttcatgaaacgcagaatgtatttcattatatctgttataattttatcagacccaactagatacatatttcttagttgtggtgacgatattacaattcttccactataaggttcaagtacaaactccgtatcattaagtttaaatccttcatcagttttaacaaagtttaaaccaaccatttctgaccactgttgtactttattaacaacaccatttactgccttagcatcatcagcatccatatgtagtatttcatccataaattcaacaacttcatctgtggagaaatccatacttgctaatgaacctacaaagttttgtgcttctttatacttcattatatttctttcattctcagattcacttcgtatctgaataataatagaatccctattttctgatggcttagtaataatcatttcccaaccatgttctttactttgagaatgtattttagtaatttcatccctcgaatgaccatacaatctggtttctaaataacgagatctttctgcaatatcgctcagagttttcatttcattgattgaaactcctagatcttcaactggtccttcttcatggtcagtacttattttattaatattttcaaaagcatccataaatttcttgtataacgtgctcattacagttctatactttttctgtgatgttttatatatactaataataaatccacgagcattatacttatcatcacgggataatacacgttgtaaaacgctattgaatgcttcttttggatcttctggtaaattgtcttcatcaattaatatttgggcttcattttccatagcatcaattacattacccaactgtggggtatattcaataccagaacttaagtattcattatggtctttatcataatttttctttacttgtaattgatttgatttgctattaattttctttatcacagaactttgaacaaaatgttgtgcttcatgatatgcagtactcatcagttgcattgcagatgaatatacttctttaggaagtaattttatgtttattctaataatatatgcattattagctacctcagtcatagatccgcgttcctttgcagttgaatcagtagttataactaaggatagtttagtttttttaatttcgtccacaacttctggtgctaactttttaaaatttaattcttttatatactgttcagaatcaaaaggtatcttcactgactgattaataatattgttaaatgattgggggctaatgtttttagcaccatatttggaactcaaaacgttaagtgtttttttacattccgcaataacattggcttttattttatcggctgctgggtgcttgcgggtgtccgcatccatttgtatatcatattgctgaataaactgctttattttaaagtacaatatactagctacatatttgtttatttgtgacatagtggagctaggaactttaataatagattcttgtagttgattatatttcatctgttccttcctggtcatttccttttaatttaatcaaacgtttagctatatctgttatcttagcacctatttgttttggtgcaattttaccagtttgtttacttctccattgttttccttgaaacacataatcttgattattaggtgctctaaattgataccctactggtatttcaaccgttttaataacatcaggtgttaatgcatcttcccactcaccagtttctacatcataacgcaaacgttgtttaatagcatttggatttgatgtatacgtcttttggagatagaactagtttttctatatggaaacttatcacggatatatctccataaaaatctccctttagaatcaacagttaacatgtgtcttactaatgattcgggtacatcatcatactcgtatgtacttccatttttaaaagtaatatacaagtctttaccattatgttcaattgttttaagatgtgaggactctacatctgttggagcaattgcttccattattgctttatataattcttcataactcataataaaaaaactccaagatttgttttagatatttatcatatatctaatcttggagtttttaagtctatattttaaatatcatctgggtaatctttacgaatcagtgtttctagaacttctagtgctgaatcatagtctttaccatttgcttggcatggaactttgtcatattttaaattttgacgtagttgttcgttaccattgtcaatcattgcagcgaatgtaatacacatttcatcagtaaatgtacctacatgatatgaatgtactgaagagtttaatgcttcaataacctcccatgcttggtcttggtccatgtggaatacttcactacaaacacactcaacatactctgcatgtgtggtaggatcatctaacaaaataaagtgaaacttaggaacatccaactgatttttttcagggtgttcttttaaaaataattctagtccagctttaagtactttattatcaactttactatgttcagattgtagttttgttacataaggagtaatatcattactccctgctaagtaataaactgaatctttatatgtggctttcacaacgctgaactgttgaagtgaaaacacttgttgttcgatagtatgtttcatagaatcgtccttattattttactttgacagtacaggttacctttttaccttggaactcgactttttgaacatatgaaacgttacccaaacgattaacgaatgattccattgcattaatatttgcttgaattactgatgcattagttccacgtcctgaagttttcattacaatatgtacatgttttccttcatcaaggaatttttcagcactttttgctttaatctgcaaatcgtgctcttgtgtaccaaagttgaattgaatctctttaatactcacggcattttgtcgttgttttttaagagaagccttttcagcttgcttcaactcatatttgtatttgttaagatctgtaattttgacagcaggttcatcacctgcaccaataaccaccaaatccaatccttgattttctgctaaagtaagtgctttagagattgccatgacctcacttacaccttccgtaacaagacgtacagtttttgcggtgatttcgttattggcaataatagatttcatgtaataaaagctccaatatgattttaatgttttgttcgatagtaattataggatagaacattagttctgtcaagcactatcattgtgttttttaattgcttcacagattgcttgaacttgaacaagataagtttttgcaaattctgcttgggttcgcacacgtgggtttggtgcgtctttgatcataagttctaggtcataaactaccttatcaaaaactcccttgtcttcaataatacgatcataaaatgttttgtcagtcatgtcaagaactccatgttataaaattataatttaacgtaagatactactgatgcatcagtaactgaaggaacattaagatacacgttctcatattcaataaaatcaacagtacttgtagtaagtgcgttcttgattctctgaatggttttttgtacagttatttcttcatttacgatagcattagtaccgtcacctttcaatgaatcattgattagtttttgaattatttcagcagcttttgcagttttcatatcttcagtagttagtgcagcttggtcagcaacacttagtgtgttaataaacggttgataactaatataaccaactgtaattgttgcaccagttgggatagtttttgcagttccatgtgtagcaaattcaactttactataaactggtactgaatacgttgagagcaaacgtgaaagttgtagataacgcaaaagtgcgattgacttatcaatagtttgctggtcagtaggtgcggttgttggggaagatgaatcataatcaccatacatataatatgggatattatctaggttcgtccctgaaacttcaattttaaatacttgtagtaaattgttcattgtatattcttctccataatacaaaacacttttgattatttattattaaaaatcaaaaatatttacgtataacatttagttttttagaatcgtgcattttgtctcaacataacactatatcgtggacgtgtcatggcagtgtataaaattctacacttagtatcatttgtaccaatacgttcaataaaatcagtatcaaaccaaatgttatcaaaagtacttccttgtgatttatgaacagttgttgcgtaaggataattgataatatgcaatttattctttattacatagtaatcctgccacatatacggtttctttgtcaatggatttatttcttttttctcaatatccttaacaagtttatctagtttttcgtccattgcaattcttgtttctggtcctacacctaaaatataactgccattaggtaaacggaattgccaacaatcaatccccataaaactttcacgtttcacttcaggacattgtataatttgttgtactacatatggactattctcagttatgctttcaaaaacaattggttcacctttagtaaattcatctggaacttcaaatagttgacttctaatgtaaatattagctaaattaactctatagttagtatatgctaagattttattttcatttacgaaatcaaatatttttttagatgaacccttgttttccataataaattcacgataaacatctaaaaataaatcttcatcatcaataggtgtaatagtacttaaaccatatgtctgatgcataatatcaaatggatttttactagttccaatacactctcgaatagcagtggcaactgccaaaataggattatccaatgcttgacgtaaaacctcagttaactcatattggacaggtacatcaaacgtaggagacaatttagtctctcccattgtaccttcggactcaactggcggcaattgacaacgatcaccaatgaataaaactgctcgacggacacgccacaattgatcctgaatatgttgaaataattcttctgaaatcatactacactcatcaacaataagaatgtcaacgttagtattactaactttactttggggatcatgtttcagtacttgacgattcttttcatatactaattttagtcctaaaaaagagtgtattgtactaacttgtgcatcttccttagtaagaccagcattattgattagcatattacgaataacagcattggctttatgtgtaggtgaagttactgcaatattatagtttttacatagtgcttttacaatctcagcagtagtgaatgtttttccagttcctgctggagcagataaaaccgaaattgtcttacctgcatagttgtaaacacgatctataaaatcatcaaagatttcttgttgcttatccgtaagcttaattttactcatcattccctcgactgatttttacatttcaagttaactgcctttcatttcctcggcagcagtacgtgcaagttggtcagcaaggttattataaacattatctgcatgagctttaacccattcaaatttacaacctgaactgatttcatccagaattttccataaagaatcattcttcacattattccagttacgttttttccaaccagctatccattcattaattccacgaactacatagttggaatcagtgtaaacaaatatttcagggttttcatatgtatccttaacatattgaataccagcaatagttgcttgtaactccattttgttatttgtagtcattatatcaccaaatgacagtttgtcctggatttgattatcaataactacaacaataccaacaccgcctgggcctggatttcctagacaagaaccatcagtatataagtctattttcattggtatgcatccatccaatcatcgtaaacatgaacaatctcgtaataatcaacaatcgtaccgtcagataatgttttagactcaaaccttgataattttacacgcttatcatccttaaatcgaacaaaggtatcacatgtatatgtacccttgacagtactgtgaatcacttcattcacataaggaagagcagatttgtaaatcttagcaccaccaatgacaacacattcagggtttaatcgaatcaactcaggtaagcattgttcaggcaagaacatgacattcttatcatctgaatatttttcaatatcatcacactcacgagaaactaggacaatattcaaacgttttggaagtggtttttttggaagagatttccaagtgttataccccataataatcattcgtccaactgtttcttctttgaaatgctcaaagtcagctttactgtgccacggaatggaattattacacccaataccatagttttcatcagtgcatagaatcatttttgacatacaagttcctctaaatctttttcatttttaatacgatatatggataatatcacaattcccaatccaagtaaaggcattccaagaagactcaccgaaataatactatgtataattgttgacattaaaatattaatataagtgttttttccaataggaaatgaactagtgatcaatggtaaatcacgcgttattgtttcttcttttatttttatataatgaataagtgttttatgtaaatgtaccataagccccaaaacaacaagagagatacagtacaaaatactagcaaatccaatatatccagaacaaatgaatgtcaaaattatatcaatccacattatttgtaaaattaacatattacttctttctccatataaactatgtaaaacgtaaaaatgggtaaatactttataaaaataacaataagattggagattaacaggtatatgaatatcgacttagatagtagtataattaacaaaatccttgatgttatctcccggaatgcctgttattagaacaatagtagtgacgttatgtcttgtattggggtttgtagtttatataacttccagttcatgggaaacttatataaacaataaacttaatcacccagaacaatttgaatcgtttaaacctcataagtatacaatttcaccagaaaagttggagagtattgataaaagcctatataaatatgtttctgcaaactctgatgatattgctatagttttggtttacaagtttgttcctgataataatacattctatcaaggtagagtacttgttacagacgaaacaaatgcatctatgggattaaatattaaatcttacaatttggattggttacccataagtgcttttagtgctgagacaaatacattactaagggggaaaatattttgcgttgaaatttctaaaatttacacagaatatttaaatcctgataatgaagcacgaaatgagtatctatcacctattaactttccagcaatagttcaagatggtggtgtttatcttgtttcagtaccgattaagtacacttcaattgaaggatatgttagtgtttatttcaaacgtgtaccacaaaatgtggaagaagctgagaagtttcagagacttgcacaaaaagttgttaatgaagtaggatattatatctcattttaaataaaagaggaaacacatgtcaacacagaaaagaatttactattctattctaagagtgttaattgtatgttcttgtatcactttgagtatttttctctttcttaataggtcacaaatagaaaatagaattaccaaatcggtaatacccagtattgaacaatatttttttaaaagttcgttggaactggataaggtaaatgaatcttttgctaaaataatttcaaaacattcagatattagtacggtggttctatacaaatttgtaccagacgaagacactaaaatgtataaaggccaagttcggactagttctaagagatcgctctggagttaggagaatgcgtactgatatgtacactttagacagaagcgatagagcatatcaagaaatatttcttaataaagttcattatgaaacaatcattggatctaaaatggaatgcagtttatactatgataattccaaagattattcatgcgatgatgttaaacatattcgttatacttataacacaattataactattcctattttagataaggaaaagtatgaagttgctggttatgttatgattacaacaaataaaacattgaatcaacatgaagtgcagaatctgattaacgacatcagaccgtacattcgtaactttgataattcaatacaagatattaaatgattaaaaggagcaacaaattgttgctcctttttttattaagcatatttggtcaggtctggctcaaagaagtcttttccttttaaacctttaccatcttttccacgtttaataacgaatacattcccactctgctcaacataagcaccagtataattatctttttgttcaatgcgttttggtggacttgataatgtatctgcttctgcaagacgaaactcaatactttcaagggcttctttctctgttttacaaaatttactcatattactacggtgaacttcatcatatgcccctgctaggtcaaatccacttgcacgagcgaatgatacacatgaagatacaatacgaactagtccatcactgatagtgcgactatcaccaatttcaacaccacgtttaaattgctcaaaatagtcagttaattctttaacataattcaaagcagtatgtttatatagtagttgacttttacgattttcagggtcgattgtaatttcgtattcacccaatgcatcaatgcagccataagtagcgattgcaccgtatgtaacatacagaatatcacacaatgcatctagaataccaaccttagaatccttattgatagaatcaaccaactcacctgtaccaaaaatttcttctttaataagctcaattcgaagatttgcaattttagaagtttggaaagttcgagtggtgttaactggctggttacatacttccatgaactctacaacttgtttatattgatctaatgttgttgacattaccattctccataatatgcatcaccataagtgatgttgattgtttcaactgttgcaaattccatttcaatattggataattcgcacattaatttatttgtaaatgttttaatatattcttcagtactgttatcatcatataacgaatcaaactcatgaagaatagtaaagccatcatcagaactacaaataaagcacccaacatcatgttcataaattacatctaaacatttgtcagtctggttttggtctaatgaaaaaagctttactggaataacaatagaagctaaagacacagcatacccatccaaatgcatttttttaagagtacgctgacttctatatactttttgtttaggaaagttttcatttacttttgaaaagatatactgcatattaatcaccttattttctattagctttcttggactttttagctagtttgttgcgagttcggttttttgcttttgcttttttatgttctttaattttctggtctttacgaacataatatccagataactgttcaataatttttttagatagttctaaatcttctggtgttaactcatacccagttacttcttcagcagcatcaatatttttttctaccatttcatttaggttattaatgttcatcttcttctccagttgtttaacaaaaatcattatagcacacttttctgttttgttccaaaaatttatacatgtgggacaaacataatgatgtgtgtttggacaactctagtaccatcacttaagattataccattatcacaaacatcaatcacagtacccgttaccttcacaccaccagtaagataaaaatcatatatgacattagcatctatcgtaaaaatatctttcatacattatacccataagaaaagggattcatagaatccctgatagtttgaatttatagtttgaatggtgagaatgtatctacttggatatcattcacaataccaccaatgatgtaagaacttatttcagtttcttgtggtgcaacttgtactgaaccaccactaacccaatgatcagtccaaggtagtggattactcttagatacggtatatggacatttaattcctagtgcagtcatacgcttagaaccaatccaacgaacatattgttttagaatttctgcattcagcccaatgattgaaccatctttaaagaggaagtctgcccaagcttcttcttgacggatagcagacataaacatttccagtacttcatcataacactcttctgctatttttaccatatctggatcttctttttgagaagacgtagaatcatttgggttgctgctaggtgtaggttttcatcacgacagattagacggataatcttagcattaccttccattagattgttttcagcaaacgcccaagaacacgcaaagcttgcataaaaacgaacaccttcaagaatgttaatactattcagacacaaccaaagttttttctttagttcgtataaactaatttcgactgtttcaccattgattgtatgtgtaccaacacctaatgcacggtatagagtacctagtacatcaagatcatcatagtatttggaaacatcagcagcacaatcagtgatttctggaatgtccaacatagtatcaaatacttcagaaggattaggataaatgttacgaataatatgagtgtatgatttactatgaatcgcaccttcgaagaatgcccatgtctcaatgaagttctctagttctgggagagatgcatagggaagtagcattaagttaggaccacgaccttgtacggaatcaagaagaatttgacgtttcaagttagaggtaaaaatgtgcttctcggaatcattaaggttggcaaaatcaattttatctttagatacgtcaacttcaccaggagtccagaagaaacttttctgttgctctgttagtttttcaagtgtagagtatttgttactttcaaagcgttggatatcaacactttcatcaaaaaacatatttttttctaggtgagacttctcgttaattttgaaaactgacatatatattcctttatatattttgaaataataatcccgccgaagcgggatcttaaattagattttacaactatcacaatcaccttcatctaaatcaggaagtgatggtaatacaaattgcccagattctggtttggcagcttctttcagtactttttcaacgtcaacttcatcagaaccatcattggtattatgataataaagatttttcaaaccaaccttatatgcatacataagttcagttagaagagttgacattggcaacttaccatcagggaagtgtattgggttatagctagtattaacactgatactttggtcaatgtatttttgtagaacaccacagatttgtagataaccaatgttatctttctgatcccatagtaaatcatatttgtttttcaacttattgatttctggaactacttgtttaagaataccatccttagatagtttcttagttacaagagaacgtggcttttcaataccgttagtactgttactgatttgtgcacttgtttctgctggcattaatgccattgttgttgcgttacgaataccatattctttgatatctgcacgtaaggattcccaatcttgttttagttctttagttactaattcatcaatatcagatttataagtatcaattggaagaatacctttggcatattttagattatcaaatccttcacacttacctttctctttagcaagctgtacagaagatttaattagatagtaagaccatgcttcagcccactcgttaactgtttccagtgctgcttcattataacgtaaaccacgtttagcaaggaagtatgcaaagttaataataccaacacctagtggacgatacatttttgttgctcggtccgcatgaactactgggtagtcttgatagtccaatagtgaatcaagagcacgaacagaaagatcacatgcagtttccatatcttctggtttatcaaagttaccccagttaattgcactcaacgtacataggctaatcaaaccttcaccagtattaatatcatcaaatggcacagatggtagtgcgatttcttgacacaagttggattgttcgataggagcaattgattcaataaatgttgagtgagtgtttgcatggtcaatattttgaatatagatacgaccagtttctgcacgttcagtcattagagtgctgaatacttcaacagcaggtacggattttttacggatgctttggtcagcttcgtattttttatatagtttttcaaattctttttggtcagaacagaatgcttcatatagcccaggaacttcattaggactaaagaatgtaatgttctttccatcaaccaaacgttgatataaagttttgtttacttggaaacaatagtctagttgacgtacacggttaaactctgtacctttgttatttttaagtactactaggttatcaaactccaaatgccacaatgggaagtgaacagttgctgcaccaccacgcacaccaccctgtgagcagcttttaacggtcttagcagttgctgcgataaaaggaatcaacccagtatgtactgcatcacctgaacgaatctcagagtctagagcacgaatacggcccatattaatacctagtccagctttacgtgagatatagcgtagaatggcgtgatttgatgaaccaatactatctaaactatcaccaacgttcagtactacacaagaactaaactgacgtgtgttagtacgtagacctgccataataggtgttggaagactgatgtcaaaattacttactgcgtcataaaactttttaacatatgacatacgtacagaacgatcatactccataaagatgattgctgcaatagtcatatatgccatttgtggggtttcataaattttcttagtgactcggtttttataaagatactttccttcccactgacgcatagcaacataagtaaatttgtcgtcacgcttatgtttgatataacgcccaagctcttctatttcttgaagagtatatttctccaaaatttcaggatcatatattttagtatctaccatttcttgaagatgagcagtatacttaattgggtcatactgtccatatacttgcttacgaatactatagtttaataatcttccagcaacgtattgatagttcggcgtatcttcagaaataagttctgctgctgcttttattagaatatcatgaatagtactggtttctataccttcataaaactgaagctgtgcacggatttcaatttcagaaacggaaataccacttaacccttcagcagcgaaaaataaaatttgatggatcttatccaatgataacggctctttcattccattacgcttggttacgttaatcatgtgtcatccttgtttattgatataaatttctttttttagtggaagaaaaaggcgggacgccttttaaggtttgtcccacccacgatatacaaattctatatgatatcctgaatttaaataatccgagttaactatgttaaattgcatatttccagttattgaatcatatgcaggatcttcaaatgagatagatataattgcatcagtacgatttgtgttattagactgtgcaatcattgtgtttgaaccagcggctactagttgaatagttcctgattctaaaaccgtttctgtatcatcatatgcaatataatcgatgaatactctactttcactttcaagaataacttctatactttcttgattttgtggaagatcaactttaaacggtctattaattatttttgataccgttctccacggtgaaaattctgtaattatttctacgttttctttacctgaatttggatcagtagtccaagttcttccagcgactaagctggctgggtcagatgatgatggaaggccaataaaaacacgacccacatcagtactgaatcctatctgacctttttctaatgcatcaggtaagtctctctgtttaccagttcttacttgttgtaaagcaatttgttgttgtgccataaaaactatctcctatagtattataggattatttagctttttctttaacttccgcaatacgctcattaattagttgagatacaactgagctatctacagaagatagaatttgttctggtactaaagattttaaatgtttaacataattggaaacactttttaattctttagtttgcaatgcttctttgataatgtccaaatcttctttagatgaaacaacacgctcaataacaacttcatcttcttccaattcaggagcaagttcttctgcaataatttctacttcttcagaaactttaacttgttcttcactatcaacaacatactcttgaataacttctggtggtacattgcgtgatacttcatcaacactaatatcttgtgcaatttgttctttaatttcttcaacaggtttagcaccacgttgtttataatctttgatatttagaattagcttatttgataaatccagtttatcaatctcttcttcactaagtttaattacttcttctaaatcataacctttacttactagtgcacgaattgtatatagatcttgtttcatttttttatgctgctccatttgattcaatttctccacgtaaaatatagtattgttctacacgttcaatccacatattgactgcatctttgaagtcttgtccttctatgacaaactcttgatattgtagattgttaggatcttttcttacacagatgaaaatcacaccacgttctatattagttccaaacatttgattatgggctaatgcatatgctgcaatttgcatacgataattttctatttgtccccacttcttaactttacgggaatttttataatccataatggttgggattccatcatgaacacctactaaatcagttgttccggcccataaaccttcatagtacaatgggacttcctgtccccatacttcattaattctaggccatgcttcttgctgaattttgtcagccattctacgtgcaagaactcgaattggcataccaccttcatggtctggctttccttccaatctaaattccaagttctcatgcataaaagtaccaactgtacatgcttctaatgtaatctcattagccttttcttcaccaacaaattctctccatttctttaaaccttcgtcattcgaggtcgcacttagaattgttgttactgacggcagattaccagttggagttgaataaaggcgaccttctgggccgccttcaattctattgtaaccaacatatgtatatctgctaacaattggtggtgtgtacatccgtgtactcctaattatagcattatattttaatttgtctcagtttttttgtttatttgctgtcacagcagcttttgtggcccaatcttcaacttgctcttcagaatcttgctcgacttcttctgaaccttctgctgaatttcctgcaaaagttacaacatcagaattagcatcctgtacaaaaggaagggaattcaaaatgtccatcattacattgtatggaacatcgatgttggttctctttttaatttcagaaatcaaagattgaacatttacttcttctcgacccgtggacactaaagacaacgcaatagtagtaatcatattgcgtatatctttaccaggagcctcttcagtaagatcacgaaatctcatgtagaattgtccttaattattttttaacgtatcctagaacacgtttaactttcttttcattctcagaaagccatgttttcatttcttcttttgaactaaagtatttagtacccacagttccgcgaatactttccatttttacaccaactttacttggtttaacagattctttcatttcacgttcagttggtactggttcagagataatgtcttcttcaaagtctgcgtctgcatccatatcaaaagttggggtatctgctgcaatatcaatatcaacatcttcacttccaatatcagaaacatctggaccgtcagtgatatcaccagttagtttaagtgtttcagtactgattttgtcttttacatccattaaggtagtaactgcatgttgtagtagatggcgaacattatcactaaaattttgtgcagcatctagaccttgctcggctttaatacggtcaagtagtgggcctagtacgtcaacacccatgttgttaataacctcagattgacgttggagtttatcaacaatctcaccttttactgaaagaacaatttctgctttttcaatattagattcatttaattgaataaacttcatagcttctgcacgagaagctgcttccattagttttttatattttgacatttgtatttccttataaaatatcactcattttatttactttatataaccttcgccttttagaaagtttaatacacgctcttttaatttatacgcttcagctttcttttctgcaataattatatctaaatcttttgcttcatcatacttcgattcattaagtacgcgttgacgtttctgggctgctttcaatgcttcactaatcacattcgtgtattgaagacccgaactgattataccaagtacttttgcatctgtcaacattcttccttcattgagaaggttaactaatgtaagtgctgcttcatacatcataatattattcataataatttgtgaactatgattacacttaatgctataaacttttgtagatttagtaccttgtactttttcttccactaaactccaattagtttttggtttaataggtgcttgtgatggtcgtggtgattgtactggtgaattccctgataaatgttcattatatggagaattgtattgtaccatatgtggatgttgcggttcaccataatccatacctgcttcattcaatgaagttaaaatagaagccatagcaccgatatcaccaccagttttatatggaacccctgatgcgttatgtgtttcaccagcttcaatgtcattcaatccacttaacaaatcagccatctgattaactgattgttgatcatattcgtaattcatttactactcctaactgtttggtaagattcagtaccgtcatcattttctattttatttagaacaccacgtgataccattttatcagctaattcctgataatattcatttaccttttcaactggaacagtaccgcgtgcttttatcttttgtaatagtttatattcttcattagaaaccattgtattgtgaccatgcacatttagtactgttctcattaacgacctcgcatacgatgacagaaatcgataatttgatctaccatgtcatcattatcagattgtgatgtgtttgccataacactttcatcaccatagatatcatcttctttttcaatatcagaaattgcatgtatcatttcacccataccaggtgcatgatgtgacaatggtgatggtgtatcaggattactatcaggctctaaactggaattagccataagttcactgttaatttcttgtggagatttttcttcacgaattggattattttcattatcaataggattaacatcactcaaaggaaaaacgttcaactcatttggcttggtcccacttttagtaataactaatgactgctccggtgtttgtcctgggtcaacaccaactacaggctcaaccgaatcggtcccgctttgtgtacctggaacactaactttcatattattagcatttctttgcaactcagcttgtttcattttagcttgagtttgtggattgacttgttgttgaccctgagaaacattcattttagcaatttgttttgcttgcatttgtgtggcttgattttgtaaatcttcaaatacaattgcttttaattcttgtgtggttagttttgttatatctgaatatgtatagtttttatgatactcttctgataattgcgttagtgacattgaatcaacaatactatgaagttcagtactttcattaatatgtttgttaatatttttagtactaaaataattataacattcactcatctgtgctttgtatttttgtaaaatttggaatatttcacgattgtcagaattatcaatcgcagaatttaaagtgataaaatcacctgcatccatattatcaagaataacagaaacatcaacattcaaattatgtgcatctgcgaacttttgaagttcagttgctgtttggtttatatccataatttctccatataaaataaaaagacctctgtcttgctttatgatatttatcacaattaagaaaaggtctgtttgctgatgctaatgttaatatcatcaccagatgtgataaattttgttattcgttttccatttaattcggttggtagaaccaatggtataccattcaaacgaagttcgacatccattggtaatgcgaatttgaatgtgcttatggtacattttccccaagaaattggcatgttataaaaagatgaattattatctttatataaatcgacttcatttttaacaacgcttaccatcattggatagtcatataccataatagcttccaacaacctagataagttcatagcaccagtgaacttagaatctatgattgttggggttttaccatcaccaatatctactacagtatgaattgtgtagaatgtatatggtttcattctttgtccttatcttttttctctacgactttgtatccaaagaagttagtaggaggcaatctacgatgtaatggataatgtaaaccagtactgactgatgcaatagcacctgcggaagtagctccagaagatgcattttctttgatattctttttcttcatattaatttcctttattacgtttttcatcaagtgctatattctctaaccctttttgaaactttttataatctcggttttttatacttagaaataagcgtttttttaaatcttcagcatcagtttggttaaactcatcttcaatgctctccaataaatgaatcacagagtttattgcgtggtcggcacgattactaaaactctgtaatgtatctttctctggtgtatagtcaactatactatcaagtagattctttttattggatttactagacatttatcatttcctttgatttaaccattgcttcattgcatgaacacgatcagtaccagcatgtgtctgtggattctgtatttcgttttgtgtcgtagagttaggagcactatcagtatttagtgttacagtattgtctggttgaatagatggcggtttagctgcaccagaaagcgtatgacgtaatgtttgcatagtgctaggtggtaacgccatgttccctccaccaatcttagaaacaccgctgtgacggaatccgttaccttctgtttccatttgttgtactgtagttgcgtggtcaagaactctcaatgaatcaatatcatatgacatacgcaaacgggaacctactgcactactgttacgtgttttttggaaatcaaaccatagttcgccagtttcttttcgtgcctcaatataaattacgttatcagcagtataaatttttgaaataccaccagcaatctgactttgacttttcttatcttcgtccataccactacggttaaactgagatgcagtgaaaacagttaaatccattttggttgccagtgcacgtaattcttctgatacaaacttatctttagtaaatgtattggatttatcatttggtccaagacgattagaagttaatagatccaaatagtccacgcatacataatcaagtttgatttccatcttaatttgcaattcacgtagataactttcaatatcgtctgtggttgttacagattcaggtaagcgtttaatacgcaacataccactgtttttaccttcaactttaacagcaaatccaatcttttcagcttcattttttacgttactgagttttgattcagtcatcataccatagatacgaacagcaaccaactcttcagctagttcaagtgaaatgtatgctccattcattccagctttcgcaaagttaactgctaaattttgcagtactactgatttaccaccacctgatgcagcagcaaagatctctaactctctacgcccaaatccaccgaaaagtttgtaatcaagagtttcccaaccactcttaaatgacccttgcattgtactgagtgagcggattgtatcttcagggttttcaaaaatatccaaacctaactcattctgtaccgttaccaacattgcttctcggattagttcttcgattccaccatattttttctgatggacaagttccattcctttttcaacggctaaagctaatgctttatggcgacaaaattcaccacatgtatcaagtactgattgtttatgtaattcttgaacttcatattgatcgtattgataaccacctttaacttcaatatcttttaaagtaggtgatgaactatattttgcagcataatcatgcacgtattgaatactttcatgaaatgttttatcaaaatattctggtttaaggatatttttacaacgtacatataaatcaggattactgaaaatctgagataataagtattgttgtgcattaatcccatattgtttcacatccactgtgctttgaatcatctatgttccctcattatatgtattacatccatttatccgtttgagctttaatataaaatggctcatctactatactatcatgtattaattgtaaacaaaataacctaccaaatcgtgcacaagcttcttcaaagtccttgatatgacgtattgtactaccttctcttacagcaccaaagtctgggaaggaaacactgaatccattttcaagtgcttggtctatagttattaatccatctttatctctatctggaacaataactatttttttacctttttgctgtgcatcttttaatacatcaatctgtacgtttgataatttaaagttattagcagatacaccacccattaatgctgcgtctaacggaccctcacatactaaaattgtttttattcgttcatcttttaataaatcatagttatatagtatattagtacttacttgatttataaacctgtatgtacttccaggatcttttaatttatgtcgtgcagtataaccaataattttaccattcatgaaatatggaataataaatctgtcatacattttatgttctttattaggtgaccaatataattctaagtctaacagatatgggtttctttcattgacattatgcaaaacacttataaattcttgtggaattttatcttcaggtaaagaagcccattcccaaaatgtttttgcatttgatggcaaatcacgtactgttactcggtcatacaattttgatgcaacagtttcttgtgcagcaaaatcaccgctgtcaaccatttctttaatataaaacttaactaattctatttctttatcttgtgcaccaaaagaaatgagcaaagactccatatctttgctcatatattttcctggttgccaaccagtttttaaactacagttaaagcagttatatgaaacggaaccatctgcattgaacatatgattaccacggtgctttgtatccggccttgaatgtcctctgaacacacaagctggacagttgtgatgtgaccatgtacccatcgcaggtactggatcattcataatttgtgccattatgttttgtacagcgttcataagttaatccttgtcttttcttacaaatgattatagcacaccttccagttttgtctcatctacgtatcaaaattttaggtactgttaggaaagggtcatacacttttcggacagcagcatagtcatatggcactggaacaattttgggatgaatagcaaccaccaaacgtaaccacatataatttcctttaaaattaaatgcttgtattccatcaagttcttttggaaaaccgtctgaatcaattccattttcaatataatcctttccatctaatttaataataaaccatttatagttttcattatcattaggtacgttgttacacaagcacccttgtagctgtattctaccaatgaatttatcaaaatagattgcaatactacttaatccatctaccaatccaaactgcatttgtgctggtaatggagttgatgcgagaatatcatattcaccaatcataccatttccaattggttcatgatataaacgctttatagttgtccatgctggatttttattaactgatatttcagtactggggacaaatacaggtgctgcttggtctgaaattattagctctgctgatgcttcaaagttcattcctgtgtatagatattgtgttggttctataagtgaaccatccattgttactttagtaatgctccatctatattttgaaccaggactggtatcttgaataactcctgctggaacaatacatccataatatactttctttttatttcctaatgtttgtcttgcttgtccactttctgataaccaactgggttcttgtttttctaatacaacatcaaatagtttagtattatttcgtgcatcaaaaatcataaatgtaagatattcattatctttcaataaagtatattttccatcagcgttgtgaacagtaaaagataaattattatttgcccctctatatatagttagtttttcattgctatatggcatattaaaattgcccaatgatacttcctgattataagggtacataaacacgccgtgatgagccatagtttttccttccataaataataggtataaatttatactaatatttatggaactaatatgaatcaatataacactattccaccattcattactgtaatccagtatgatggtaaaacgtttgttggtatcatcaaaatcaaaagcaaacagtatacaactctttactgtttcgatgatatggatgattcaatgcaagacgaattgttaggtatagcacacgattggtggtggcaaagtaatagaaccattccagtttgtctattctttcaagaagagatggagaaatttgaaccgtacacacagagattcgatacaccgtcggtgaatttcgtatgtggtccagtagtttctttaagcaatttgccacaaaaacgcatcaagcgtcgtaatgtggctcttaagaagaagtaagatgttcaactaaagcatttagttgtacaacaatcattaagctatatgcataagcatgtggctttttgaaatatcgtaatttatttcctgcttggtcagtgccgatagtactataatcccatatggtggctttaacttcgtcccatgtgttcatactttggcactgcctttttccagggcgtatcattgcaataaacattgcaagttcgtctatggatttaggtttccatacatttaataaagttacatgttttttaatttgcgaaagatgttctacaatttccggttctaataatagatcccaatttggttcctgattcattagttcttttaaatgctctctatcacgaacatacatgtaagctgactgtgaaagaatatcaactttttgatatcctagactttcagcttctttatattgtatacttgccaatccggttattggatcaattggtatattatcaaaatgaacaccactattatgggggattaaaccatcctccgtaattttttcagtacttcgcacgcaaggaagttttgcaattacgcttttactatccttgaagtcaatgtcaatatcagttcgggcttttctataatgtttagaatcggtcgaatcctgcattttttatttgctcctgtaactgtttaactgtattagtcaaagttgatatttgattctctaatagtctacaattttgttttgtctttgccaactcttgacttaaactgaaaaatcgttcttcgtgtctttctaccaaagaaataattttttcaatacgagcaggatcatgaacttgaaatgttttaccatctaaagttatttcagtaatagatccttgtctaagtagagatatttgttttgatttttgttctttaggtacaggtacatacccttctggtattttattatatatactttttccattcataatcctgcctcacatagcataatcttaatttcatcacaatcctttttgtattttatagttttgat

SEQ ID NO: 2 - DNA, 238441 bp, Goslarvirus sp.
  source 1..238441: mol_type = genomic DNA
tagactatcttaaactcatcgatacgatccttgaagctgattactattaccatgttaaagcggaaccgaaatacaccgacgaagaatacgacaacatggtgaaaacgatacgggaatatgaagcaaaacatccctgcctggtttcacctaacagcccaacccgtcgtgtaggtacaccggtcgatggttttgagacggtgaagcatccgtctccgatgatgtctttggataacctgttcagtgaagaagagttgcggaattggacggagtccatcgcaaaaaccttaggggtagcagaagacactcttgaatatctggtcgaacctaaatacgacggattagcaattgcgattcattacgagaatggcctattgcaacgtgcagtaacccgcggcgatggtgttcaaggcgaagatgtcacatcgaatattcgtacggtaatgggtgttttaccgcaatcgaagatgggaacattaatgccgcagaaaatcgaagtccgcggtgaagtgttgatgccacacaaagcattcgaacttctgaacacggaactcatcgcaaacaatgaaaaaccatacgtaaatccacgtaacgcggcatcaggtacgttacgacgtttggatccacaaaccgttgcaaaacgtcgtttgttgttctgcccttacgatgttttcatggatggtggtaatatttacacgtttgcaacgcagggatcaaaaatggggtttgttgccgcattaggattaggtctatttaacgaatcgcatatcgtcgttgggactgaagcgttaattacggtgcatcgcgatatacttgcaggacgcgagcaccgaatgtttgatattgacggtatggtgataaaactgaacgacgtcgcgatgcaggagaagctcggcgcaacctctcgcgcaccacgttgggcgcgcgcatggaaattcccagcgcaagaaaaagccacccgtttgcttgatgttgattttcaagtaggtcgaaccggaagcatcacgcctgtggctcgcgtcgaacctgtgttcgttggaggcacaacgataagcaacatcacgctgcataacgaagccgaaataaaacggttaggtgtgtgcattggtgatgatgttgttatccgccgcgcgggtgacgtcattcctcaaatcgtgagtgtgcgtcccggagaggaaagaaaagaaatcatttttccaacccattgtccaacctgcgggacagtattgacgaaaaaggaaaatgaagcgcgttggcgttgtcctgcaaccggaacttgtcctgaccaagcggtagcgcgtcttattcattgggtaagtcgtgacgtcatggatatcgaaggtgttggcgaacggttcttggaacaggtctacaactgtgggttggtgcaatctgcggttgatctctatctgttaactcgtgagcaggttagccaactggaagggtttacggattatagcgccttcaaggttatcgacgctattcagaaatcaaaagagactacgttagcacgtttcatctacgggttaggtattcttacagtaggtaaaagcacagcgcgcgatcttgccaacgcgtttaagacggtggatagctttttagctgctgataaagaaagcttactcgcagttgaaggtatcggtgagatcacagccgatcagatcctaacgtacatctacgataaagcaaatcgcggatatatcttcgatttgttgtacgatgtcggtgtagcgccagctccagttaaggaacgcgaaatgaatcagttaccgttattagatacgcgagtcgttatcacgggaagtttcaacaacatcgatagaaaccaactcgccacgcgtttagcgaccatgggagccacaatcacaagcggtgtaagtaaaaacacaacggttcttgtctgtggaagtaatcccggtagtaaactcgcgaaagctgaagcgttggggattcccgttatccaagactgggatgcaaccgataacgaagaagaaagtatcaacatgcttatttcgatgattgataaggttaaggagaatagaaaagatgggtaaatgttggacggataaagaagatgaaacactgctgcttattcttagcacgtcaccaaaagcgagctataaagaagtagcgcgctgcatgaaccgaacaccgtgctctgttcgcgcacgttacatcaagttgagaaaacaacggggtgacctaccacctcgtgggggagtatatacgccagaagaaagggttagggttgccacgcttgcaaagaaacatacgctaaaagagattgctgaaataatgaatcgtagcgtacatgccatccggtgttattgttttcgaaacaagataccgcttaaagtaagacgttgatggggtggcattatggtcaaggactggacacccgaagaagatgcgatgttgattaccctgtaccgaaacggtataccgatgcaagagattgcggtacgacttggccgaacggaaggttcggttcaaggtcgaattaaccgtaatcgcaagcgctggaaactcacgtcgcgtcaccgctattgttgtttcgaagaacgcgtgatgttagccgattatctcaagacgcacagcgtgaaagaagccgcggtaatgttcaatcgtagcgtggatgcgatcgctaaactctgctaccgctacggtattatcgcgtgcaaagcgcaacgtcgagagatgatctatcaccgaatacatactcttagaaaagagaagaaaacctgggagagaatacagaatatcatcaataacgaatttaacacccattacacgttaagcggtgttcataccctttactacactcaagcattaaaaacgcgtagaacaggagaaatctagttgtgaaacccccagtacgacgatggaatcgtaagtacgatgagcagttgctgaaactatacgatcgtcgcccgaaattaaaaatccgtgaaatcgcggaaatcatggaaacgacgtacggtgcaatcgaatcaaggttgaggtacttaaacgtcgaacgccgtaaaccgcataaacgtttcagcgtcgatgaattagaacatatcagactacactgtaagcacaaaagttacaaacagctcgcacgcgatttaaacagagatccaaacagtattcgaacaatagcacaccgccatggcttcaagcggttaagcgaggatgatactaagatcttcatagccttcgttgatgcattgttagaagaaacgcaggattggtaccacattgctgaacgggttaatgcgcattttggcataacacggacgaagcaagctgtttatcagcgttggtggcatcatagaaagaaaagagggatacaagatgggacgacctcggccgtggcgtaacgatgagttaaaagatgttacacacatgtacttgaacacgccgctgacgattgatgaaatcgcacaacggacaggacgaacatacgccagcatcgacgcgtgtctggggcgtttgggaatacgtcaacgccagaagcatcgaccgtatacggaagaagaacgtgcgtacatcaagtccgtaatcaaacaaaaatcgctgagggagattgcgtatgatttaaaccgttcgtatgactcggttcgtcagtttatacggcttaatggaattcgtcgtgcgttaaccaagcaagaacgggaagcgattatcgcgtttatcgcggaacgacttaacgtcacccaaaattggaatattatcacatacgacgttgttgttaaatttgggattacaacgaataaacatgcgttgtatcaacgttggtgttattacacgaaaaacaaaggagttgcccatgcgcaaataccgccgctggacagatgaggaactctcacgcctcgagaattacgcgtatcaaatacctagaccatcgattagtgaactggttaccgtgtttcaacgcacagaaagcgcgattaagaataagttatacgtattgttcccttcgccgagaaccaacgcgacgtatacagacaacgagctttcctatattcgcgataatatccatagatactcgattaaacgaatgtcgaatcatcttggtcgctcgaaagcgagcgtcgcctccgtaatacgacgtcataaactgcgacgatacgatcctggtgaatggtgcaaaatttcagaccgtatcacgacacttcgacatgaaggggttagctggagagaagttgctcgcattatcaatgtcgagttcaaacgggagtaccatcacacacatctttgtcaacgttactattataacacgcgtggtaagaaatggcggcaggtaaagaatacacaacaaccgaaatcgcattcatacgtcgaaacgctggcgtcatgacatcgaaagagatcggtgaggcgttagggcggagtcagagagcaattagcgcgattgcttcaatgcttaacattaaactgagtcatcgtaatcggaacgatatcttatcgcgggttgtccatttacgtgacggcgagaagcgccgatggcgggagatcattactatcattcaggatgagttcggcattacgtattctgaatcggggttgcagcgcggataccaacgcgtgaagctcgtaacaataaagaataccgatcctacgcgtcttcggatgttgaatgaaatccatcgttatcggcaatatgataaactttcatggaaagaggtgcaaaaacgtatcgaattacgttataacaaactttatcaaatcacaacactttgtcaaatgtaccgacgtcaccgtaatcgactgttaggtaatgagggaattttagcatgagcatcaaaacagtagttattaatgaacggccgttctattgcgttatcgcctcaacggctgccgatccacacctttacccacataaacgacagattcgtgagctgtaccgtattctcgatgatgtagaatcagaggcatgggcaaccacgtttatgtttgagaatatccccgatttaaaacgcgagtacgatgccttagaattagagaagcgtttaccggacaccgcaaagttggtcgttatgatcgacaccatcgcttcgataccggtaggcctcttggaagtgaatacagagagccatatgggcattcatgatgttacatcgattgttgtaaaaccggaataccgtggacgcgggatcggccacgccttgatgaacgaagcacgtaacatcgcttaccgatgtggcgggcattctatcggcctggatgttcgtgctgataacgacgaagcccaggcgttctacgagtccgagggtttcacggtaagatcatcgtggttaacatcatcaatcaaacagaaaggagcttaacatgagctggttcgatcgtaaattcttcacgttggaagaagtcttagacctaccttgcgacgcgaataaggaaaatatcgccgacatgcaacgagcagcattaactcgcatcattggtgatgttgcgcaattttctatcggtgatcgggttgagcttccgttcggaaccggagaagaaggagataacacagcggttaaattcgttcccgccgttgtcgtcggtgtccatttcacggcatcacaagtcagttatgatcttgcgatacctatcgacggttgcgacttgtttatggtcttcaataacttccgtggtgacatgcgcacgatagacggaagcaatgcgaccgatttcatcgagaaacgcgttgctgaggcgttggtcaagaaaacactcggtacgccgaatcttaaagttattgaaaatgaataatcgtaccctcccgtgccgggagggtttatgctgataaaaaaggaaacaaaatgaacaacgttattgcattactcacgcaaggcgaaaccagaatgccattgccgtaccagcagcttgctagtatcatagaacccatgacgtaccatcaacaatggagtgtgcgtgaagaatgtacccagcacattggatggtcgttgttaaccatggataccgcgctccagttagcgaatatctgttacgggcgacgtgtcgctgatttgggttgtgggacaggttacctgacttatgtactacgtaaacttggtgttgaggacgttaccgcctacgatacggaattacatccccacccgtttatcgaggacattcagcaggtcgactacacgaacatcgatctttcacagtacgatgttattttactgtcgtggccgccttactgcgaaccacaagctgcgctggttgccgcgcgtattcaaccacatcagcttttgatctatcagggtgagggatacgggggctgcaccggagatgacgccttccattcgatgcttcgttcggatttctcctctgtggaagaattcaccgttaacttaaatgcacgtcatttgaactttcacggcatatacgattcgtggacggtttatcgcaagcaatcagaatttacaaaacaaagggatgatttggaagatactcgtcatgaataaaggaaaagaaatggaggaccgttttatgttaatcgtaactagtagacaggaagtatccgattggcttaatgtccatcttaacgctaacgcctccccagggggcgttgtaatcaatcccgtttatgacgggctgccgttcaccgcacgttacgagcgtggtaagctgaccgcaacgaaggttaacgacgtctcattaaatccggaacatgctttacgtgtatttcgtattccgttgacgatcaattatcgcggtttagcaaaagtgatggtcgtttctggcacggtatgtaaatacgctgaagcatctatcgatgattttcataatggggtaagacactttagtgcggttgccgtaggttatcctgaagctgatcgggttgaggttatcgaacagggatctactgctgttccgtctgacgtgtttaaactgcgttgtttgttcgagacttggcggttagccagcttcaaacagtcacgtatcgttcctcatcgaacggtatcggatgcactacggcagcttgacgtgatcgtagcgacgttaaaccggacgaaaggtatttctgcgttgttgttctcgttgaacactccagacgaccgttcgcgaacgcagaatccagactgtgtgttcttaaccccggaaggagttatccatggtttaccgaagaagtctctggaagataagatggcaacgtcttaagtggttatgtaaagagaaatggaaaaagataaagagggctttaaatgacagtggtgagtattactgagccgcggtttatccgcgaagttatcgaccgtcgccgttcggtgatcgttgcttacggacgaatggaaagtaccgcacctcaagaactttgcgtgttattccaggggtgtttcatacaccgacaggaaggacataagggtaaaatcgtccctagtgatttgattaaagcgatgcgtaagattgatgttgaacaacgcaagctgaatctatcgcatcgcctgcctcccctcgatgagaccgaagccaaagacttcgctgatcgggttatgaagtcagccatcgttcagtacttcggaaacatgccaagcaaacgtaataaagcattacgtgttgaatccgatcagctgcttcattggaattcgaaagcgttccgattcgaagaggtgttcttacccacattcggtaaacggctggcgtgggacttctcaacagggtatgtttacacgggcgacatcccgccagaaatacagcataaaaaagggaaatcactagaagagcaaacagaagccgcggtcagcgaacaggtctatcagcgcctgacattctggttgtttggaccaacactggaacataagtaatgattcgtgtcatgttggctaatggagaattacgccgttactctttcatgcaagcgataaagtatctcattgttagaggagaacaggtttatttcgatagcgcacgttatcactacgatcactccgattgccgcgtaactggtttcttaatcaagcgtaggcgtttgtctaagctacagcagcatctcatttatttacatcgaacacgtgtgttctgttcgtcaacggtacttccgtatccgatcgaaagtaatagcgttaaactcgccgtgttgcaagcgttagatcgtttacctaaaccagtatcgtggcctatcgagtattacgaatcagaggagaaccgaatacattcatacagtcctttatttggtaccccatacatccaattatttaaacgcaattcattaggttagtaatcatgcaaattacaaaagcagaacgtatcgaacttttcaaaaccacaaaaaccaacgaacagaatcgaatcgctaacaacactcgcctggttgctcgaatgttgcgtgcgggctatgagcaggcctctcgatttaccagccgtttaaagcagactggcattgcttattacgatgaggataaaaatattctgatttacactggatggatcgaaaaccattgttggtgcgatcatgggcatgcgataatgcacttgactccgggcggtaacgtcagcgtaacgtttacactaacaccgttgatggtgcgtcgtgcattccgtatggataacttcatggagttgcaggcgtatgttccgatagccgccaaaatggtattaccgacgatccatgactgtacggatattgtattcaatggaaaagacctatccatcacgtactatttggattaaggaaaagattatggttaagctatcacctagatacttcaccttcgtttgcggaaataaaccgaaattcagttacagtgatgatatccatcgcatgctacgtaatcgcgtagcaaaagtgttgattgcactcatttcggagcgttacgggtttggccctgattaccctaaagaaggaggtcgtctagttgctcctctaccaccagacgaccatccgttacgtctgttattggataaggtgattcttccactgtttactgaacagacaccactaacaaaaagtttgtgtcggcacttgctctatgattacagtgcgttatgggagccgttacgtacgatgcaaccaccgtgtaatttgggggtatttgacaagtatgagatatcagccattgttaatctattttgttgcgaacacactttaggttggcatgttatcgacgaacttacgataagttgggaggtgagtaacgttacagattacgatatagaccgcaaacaaatctgtctctgggagtataccggcccaacgattcaagaactgctcgatatgcccaatctcttctacacgggagtgattatgggttaccggccaggggataaggacttctacctcgaaaatcatcgatggttaacacgacacggacacactttaacatacccaatccttgaagaaatgggtaataatgtttggcgtatacgtaatttagccattcttcctgataacgagcattttgcgaaaatacttgctgataaaggaggcacggaagatatttacagcgtgtgttttgatttaggcatcgcctgtatctttcgtatcgctgacgtcggagggagtccacgcatcgagaaggttgaacgctatcgttggacagaaggtgcagcaccgcctgatgaaatcatcaaactttttcctgaagttgtggttaaacgcttccatgcgattcaaccctacatggcgaagtcgtgaataaattaatgcattaattttcacggctatattacctaggtgaagcaatgcagtaatcagcttcaccttgaattattagcaatcaatccaatataagaggatgtcaagatgtgtatgtttaaaatgtctgtattcgctattcgcaataatcgcgatatcttaggtcatttggaagccgacgctgaaggaacattgattcgtttcatgcgtcgtgttaaagaagcctttgaaaatcgtgaacacctcgtggaagttgttgaggatcttccaccgaactcaatgcgttttgtcgctatcgacggatccgcaaccgacatccgtttcatcaccgttaacgactcaaagatgatgttttctggtgataatacggttacaggactgtttccaattgtaacggttctaggtcatttcttacgtgcaaactaatcaggtccccctaaatgggggcctttataccgattttatttcaataaggatctttatcatgaaactgttcaaaaatatcgtattcgctatcgtcaccaccctggcttttgttagcacgcaagcacaggctaactggatggctcgtgggaataactgctacgcctacagtgaagatggtcgttatcagattggtatctcagatcgttcgcttgttgtcatgggtcaatttcaatgccgtgcgcactatccgatgtctgataccgtaggaatcaatggacgtgtataccaggcattgaatatctgcagtccggacatgcgcttgatcccagttattagccttgcgaatacagatcaagctgctaacgcaatcgccagccttaaagaagcacgtcgtgcgcgtattcgtgcgtttaacgaaaccatcatcgtaaataccgatgatattcaggcatgcgctaacagtgtagcggccgtacgttaatactaaattggtttatttaagttattaaggaaacgatcatgaaaacgttaactaaattgtttgttgctgttgctattctgttcggtagtgttgtcggttcagcgcaggctggattgttggatagcccggaagtttacgataaagcaaaagcggtctacatggccatggagagcatgacgccagcagaccttgaagaatatggagtcgacttcggattaccgaaagaacttccaggagttaagaaccctatcaatcccagcgtgaaattgaaagtggccgacttcgaagttttcaatccctctttcaagacctacgcacgggttcgcgtactggttgatccaacaaccggcgttgttcagggcgctgaatatctctatctgggtaaataattgagtaaggacaatacgatgattccagctaaccctcttttaagtctcaatcctttccacagcaatcctggtgtcgatcagatacaacctgcttttttatcacagttccgggctgattatgatggcgacaccgtaactggaaacagtatccgtctgttgaatcgccgcaagaaaggtccaggcaaaggcaaagtaaaaatcattcaacgattgatctcttatgtataaaccaacactgttcgataagtgccgcctgcatatgggcggcatcgctctggtctttatgttgtacaacagttgtcaaggaggtatgtgggtacgtgcgttattactcgcattcgcgttagtgatgtttctaaaatttgaatcatcgctttatcagaaaaagtaagaaggagttcatgatgggacatatgctactacggggattaacggggatggttctagcatggatggtcattgggttttgtgggatgatgttcttcatggtcgatgaacctgctgcccgaattaacgtagggttatggttcgtcttcttgatgatagcggtattcgttatcgttaccttgttgaggaatgtaggaaaacacaaataaacgatcgggaaaagccatgagtttaaagacatacgcaaaaatctatttcattttcacttttataatgattgggatttctgcaacgaatatcgattttgaaacaacgacggaacgcgtttattacgttatccgaaccatcgtttgtgttatagggcagcttccccttttgtatatttgtacatggtcgacgcgtaacataaaacggtttgtcgtgtatgggttcgcgtacgttcttttcatgcttgttatgtggcaagccgatgctcgattgagtgatatcgcaaatatcgtcgcaacggcggtcctcagtgcaacaagctggtgtttatttttaccgatgtgtcgacgtgtcgaggatgaaggttatgggtatcacggagaatcttaagttaactaatcgcatccttgtcgatagagaagttgttttacgcgagatacgaagcgtgatggcgatctttaatctggatcatcgatccgccattatgtctattctcttgaataaaacaacctttaatatccgggagatacgtcgtattcacaacggtatggagcgacggcataaattaagcgacgaactcgtacattgcaagtttataccgcatcaagtctatcgacgtatttatcgtgagccgtatgttcgggataaatacaacctatggctcgacggtagaggttaacatctttgagaaactatatgacttcaaacgatgtacacctttaccgcgttggatgcgggaaatgggttctgttatccaacgttatgtttattgccaaaccagaggagaccgtattttcagtaccgtttatttctgtcgtggatgtcgggcaaacatctgacgctaacctgctgcccgctgaatagaacaacccgatagacgggatgcgttatcaagacgccagtggacagcaccttatcgtgaggttattaagatgcaaggtattttacacacgttgattttagggcttgttatgttgcttatcacaccgttcagtcaagcatcggtgaacgcaggacctagaatcgattgccggaaagagatcgtcgcatgcgctgtgtatatggaagccagaggcgaatctgtaaaagggcaatactccgtggcgtttttaatacataatcgatctatggactaccgattccctacgaacgtcagagacgtcgtactgcaaagaggtcaattcccctggacaaaacaaaggcgtattgtcatacgcgatcatgctgcttttgagcgagcaagagcaatagcacgagaggtcgcaacattacgttatactgacattgcggcttaccataaagccgacccaacacgaggagccgtattctttaacgcgaaacatcttcgccctaaacatttcagaaaacatgctaccaatatcaccgtggtagatagccacatcttctttggtaaacgacgacacacgtaaaacaaatccgtatgcccttcctgcgtaaggtgggaagggcttatgctgttaaactgactaaatgtaatcatcctaataaagaaggaaatcatcatgaaaacgatcaaagcaactaaatccgttaaaaccaaagttcaaccgctgcaccacatcacggtttatcgtaacaaagataacgcaatcaccaagttccgcgtccgtgtaaaagcggctgaatccgcattaaaggaattggttgatacgactgtttctgtcgatgcctacgattcgtaccagaaagcaatgctggcggcgattcaaatccgtgataaagcgttgaacagtccaatcaatgcattttaatacataacaacttagcaaacggttcttctcttcctgaggctgtggaggggaagaaccaggaaacacggatacattttcttttagtttacgaaaattaacttttacagaaattcagtaacctgtgtacttgtaatcatgtcgcgtaaaagacaatcttttgtttaaggaataaaaaatgcaagaagcacgttatcaaggaagcatcatgctttcctgtggttttgttatcgaacacccactgctcggtaaattgtttatcaaagaagaaatacgtaaaccaggacaatcgaagaacttttcaccgcttttagccgctaaagccttattagaatcgttcgaggatattaacgtcgtcacttatcacacaacgttatatcaagctgatgggtacagatggttcgatggatggattcgtgtccatcatgatcagatcgaggtcatggtgggaaacctagacgctcttccgtttacccgtcttgatatcgatactgttgaaatcgattatagtaacatagcgactaaactcccagacgatgagttgatccaagacgtacgtcgtttctggtcgaactatcaagataacattttgattccggtgcctgacgaactctctaaagtttatgatgaactggttagcgagaagggggacgtatggcgcacgtgcgaagatccctatcgcttctttacacgtaaacaaaaagaacgtttgatggtacgcggctggattgagaatcctctcggtgatgtttaccattacgttgatgcggaagctgtggtgagtgacgaacgacataaatttgatattcgggatgaacagttaatatggacagcacagcgttcagtagagcaagatgatgtgattaccatgttctatgatcctgaaatcaaattgactctgtttgtggaaggagatattgacgaatgaattggattaaggtagtgttgtttattatacttgttgctgtatctatcggactattcttttacacacgtcggaaagaacagaaacgtaaaccgagcagaccgttggttaccggtgttgtaacacccgcaaaacagtctgaattacctaaatctctttatatgacggaagtgactttagacgcatcaaaaggcaatgagcttgtgctcgaaatgttaatgcagaaacattataaagatgctgtattgactgccgagtattgggttgatcctaacagtccgggcaaacgctggcgcgcatggtatcctttacatgtaccatgcacaaacacctggattgagtggcctgcattggttagctatcgttcaaccgataaagcaaacaaagcagcgttcttcttggataccaatcgtttcaaatggtatcccgataaggtaacgaatgagccggtatgggtgcctaagaagggcggtacgtgctttactgtcggacaagtcctgttaacagatttagacgaccagaacaacttctttgtcattgaagaagaaaagcttaacgatctgattcctcattaatcgttcgatataacggtacgcggtgttcatccctaaaaaggatgaacaccgttttcctattttttcgttttttttttgaggctcccatggtatgaattaggtttctttcctatcaacgatcatctatgaggtcagcatgtatcctgaagcatcatggcaggaggaagtgttatctaaaataaacgcctatctccagcacccgttgtctctgtcagacgttacgttaacgccagcctggtatggtgcatcaggtcggttacgcctttctatagtccccgcaccacaatcggcttactatatcgaagaccccgtacaggtttatcttcaacgtcgagacattaataagctctttatcaaacaccaaccttttattgtcgttgctgataagacgacgatagcagactgcttaacgcagctgtttaagaagtatgggttgaagatcgatttaacgatctttgattcttcagcgttagtgtcgcaggttaaatttgaaagcgacgagaaaaccatagctgttcccgttcattctgatacatcagcatcgtggtacggtacgtttcaattcctcgcccgaaaagcggtaagtaccgatattagcgaactgattacggtgcgagaaccgctaacctcgtattatccagaagatagtaaacaaggggatttccacacattcagcacctacggcatcaagctaaatttaccgccgcaagatgcgatacgtacgatgtcggttggagatactccagaaggatacaatgcattccgtttagcctcgtcgctgatttcaatgagttataccttagcctgggaactcatcacaacagccaatgtcgtttataatggaaaagttgccgatgcgaacgatttagatgttccaatacttccgtcgttcggaagctctgttctggtgttaaaacctcattccgatagcggcgtcagcagcaaactttattttagttacgattaaggtggagtaaataatggcgacattcttacctgacgataagcaggatctggttgaccaactcaatgtactaaataaaacaaatatcccggctgatggtatcgcagtcactgctgttggcgatagtcaaaaacttgacggtgttggaaattacacagggacggttacggttaataaaccaaaacggtcattcgcgacactgtttccgttcggcgcgatcgtgaaaaaagaaaccggtaacgaggatgttactggccgcgccgcactcgcgttattgaacgagcagttccatctgacgattgcagaaagttatttcacagaagaatctttaaatgcgacataccagttagggacatggaacagcatctccgcacaaatcgctttagaaccaaccaaggataacccttactggaaagatacgttgttcatctcaatgtatcggtcaacgctaggtgctttgggggcatatagtgcaagcgcatcatcgagtatttatgttgatttaggatcggctagaaaagcgttcgatctgaatcgtactggcgtatacaagttacctttaccaacaacgtccagtagtgtaccggaccgttatgaatggtgtcagttattagagattaccccatcggtggttggcggacagattgactggagcaactacttaacgctggagccgttaacgccgacgttcccagtgatggaaatcgatacaacttattacttcctgctttggacatttaaccataaagactggtacgtgaaacaaatcaccgcatccgagcgttataatgatgttgctcaacttatcggtaaatggatgattacagcgtcgccggttaatttcgttggttatggccatgcaagattcttaacccgaaacacaggaacgtttaccgacccagaaaccgatcattacgtgttaaatgaaagcggggtcatggtaaacaaccgtcatttcattgcagcaacacgacaagaagcacaaccggatggtgacgcaacaacagaaggacagtcgttgttaattctgggtgcgggtatattcagtcatacaacggatgataccaagcttaaagcgcactatctcacattagcagaggcatcgttcgatgcgtatataaaagcgttctatgcaggccttgaaccaccggatataccggcacgctggatcgctaactggattgttaatggtaaacaacctgtgttggcccattatcctcttgcaaaagacgattacccaacacatggcggtttccatgacacagcggttacattcaccaacggtatcgggaaaataacacatggggcaccaacgttcggggaatacatggatcttgttgttcaggtctatgaaggtaaactcggctggcagaatttgaacgcggatgtgttcaaaaccaatgatgatgggacgattgactgggatacaaagggtacggtgttccctatcgagaaagttgcgttacgcacaaaacgttacgtaagtgctgacggggacgatcttgaagcgtgtactgacgatgaagtaggtactatcgtactcaaagataaatccgtcaacggttcttacttggttgcatgggcaccgcgtgttcctgttgaatatggcggatacctcatcaaaacgaacgagtgtcagcataaccgaccgatccaggtaccagtcaccagagactacatgggaaacgcgtcagacgctgaacagtggttttgtgaagcagcctacaccttataccgtttaacgcagcaggagcgttatcagaaagcgtacaaggcgtctttgtttacgattgaagaatatacccgtattgacgctaacgataagttcttccgtcaagtaaaaggaaccgatcgttacgacaccgacggtatcgcttacacgtatacatacccgtcgaaagcgccgttcacaatcacgcgtgataccgatggttggatcgtgattcaagcatcttcagcacaaatttaccttgaacagcaggccattccgttccgcgtcaatcgtgattcaattcttcgggtaacctgcggcggtaaagatacgacaggcgttgcaattccggttgagatctcattatcgctttctttggacaaaaccgaagcgaaagccaaaacgtacaagctggtattaccttccagcgttgaaccgaaaggatgggatttcaaaataggctcgttgattcccgctgatgcggttgatgaagcttcaataccaaccggtgatgctgttacaggttcggtgttgatgtcggctgataaagtcggctggaaagacgatatcgcaatcacaacagaattcagcgaagcagtggaagattcctgggatgggttgttcctaaaagcgcagcttactgcggcaggcggacaatttgaattcaatccaaccgcaaaacagatcgtaaggcaggtcagttatttcgcgtcgattgactacaacgttcgtgtagaagatgcaaatggttggcgatggtggtatatgctaccggccaccacagcaagaaatacattgacgctttcggcgaacggatggaggctctcagggtatcaacctggccatgctgatactgaccctaaaccttccgcacctgtgtggggcgacggttcaactgaaattctgttcttgcctgatgacagcgatatcgctgaaggggtatttaagctttacgccatcaacaatccaccgtcaacttacaccacggatgacggatataccatgctgtttacgttaaaagcaatctttgaggcagagggcacattgcgtgttggcgattgtacgattgtcaaccaacgtctggatccattgccttatactccgggtattattccgttctcgaacaactatatccctaacgcaccgacgttcgacagctggcgtggtcagccttatcccggctaccaacatccatgggtcttcctggatatggacgtatcggctgaacgacgtgacctcatgattcagaatgttgtgaatttctggtatgactcgcagcagtggtattatcagaaattcggggttttagggccaggagcaagtgcgtacgtgtgggatcgttgggatgcgccaagcggatcgaaagttaatgattttacgatgtaccacttcggcgatcagacagcatggtctggttatcagccgagggctttcttttcagcggtgaggctttatgccggactgcttgatcgtggtttggctgtccctgagaagttaaccacttacatcagccattggatcgatttcttgtttacgtatcaacaggaaaacgcttatcaatctcctacggattttccgatggataaaccccctgcttttatccctaatgactttactggtcatatggcaggattatggttagcgggtgcgtcgttagcgatgttgtatgggcatcccaacgataaaggctatcctgttgccgttaacgtttataatgaaatcgttgaaaactacatcaaccgctacaccgttgatgacgcaatgaatggtgggtggagtcctgcaccagatagtgctaatctcggcagagacggaatgtattttggtttctggagtggggagatcctccgaggattaggctattatattgccctattacgcgacgtgaaaccgacaatttaactgatgggggcggttaccgccccatgattggagtgcttatgtctactgtttatcctggatggaaagccgatcttctggcgctggtaaaccggaagaacatgctttcgttgaaggaatccgatgttaaatttgaatcgttcatcccagctgaacatcctgaaatgtgtcaggtaaccatcaaacctggagataacagtccctatttcttcgaacaatcacttacgtatgttcgtcgagatattgctaatgcgttcacaggaatccctttacgattcatcgtaagtaccgatgttgctttcaggaacatcatagattccatcgctgaaaagtacggtataaatttcgacctcgcggttgatttcctggaagccgatcttaataagaagatcagttttgaaacatcgggtattcagtcggtcgaattaccgattgctgaaagcagctatgtttggtctggacatttacaagtacaggtcattaacgatacgctggatctgattacaatcattcaagcgtaccagattacgggactgcattacctccaagaaacagacaccaccaatggatcattagtgcttgcaactgccgccgcattggatgatctcgctgttccatcagttgatatgtctgtaggacaccaattacccatcgaatacttcgaaagaatgttaagtgctttagtggaagctggtgaaattaccgacgatgataaggctcaagcattaaccacattacagactgacgagaaccgtacggttcttttcctacaacgtggcacagcacatatcgcggtaactcaaaaggatgattggcaaattggtaacctgtacggtgcgatgattgtttgttattataccgacaatgcaggtaaatacgtcctgaagaccaatggcgggaccgttaccctagatcttgatggttggatagatatttccattgattggggcgatgggaatagggatgtaataggtgagtggcctacacaggctgaatatacgtatgctgatacaaacgaatatacaataactgcaacagggtctgtgtataatggtaacggacgccaaacgatccgtgggtccaacattacagaaatcgtaaattgggataacggtatgttccgctctccgtcaaccagttaccttttatcactccgtaccgtaccaaaccgtatcccagagaaatggacgtcgttagacgaattgttcaaattcttatctatacttaatgatcctaacattcaagaatgggatgttagtcgtatcaccagtatgtatcaaaccttctccggatgcacaaacctcaacctcgactttagcaaatggaatgtgagccaggttaccgatatgagctcgatgttccaagattgtcgcaagttcgttggtaacgggttagataaatgggatgtatccaaagttaacgacatgagttacatgttcagtagctgctatgcacttgatggggacaagctggttaactggaaaacaggtagtcttgtcaacgctagcagtatgttctcgaacatgcggttcaatagcgatataagcggctggaacacttcaaaattacaagacgttgttaacatgtttgcttacaacgcggcattcaaccaagacatttccggctggaatacccaatcgttacgtaggatcgacctcatgatgcgcaacaacaccgcatttaaccaggatcttagtggttgggacgtaagtaatgtaacttctggtaaggacaacgttggacagggcgcaacaaactggccaagagaacgttggcctgggtatgtagcggcataaagtgttatcctcccctacctcgacgaagcgagggggggggtaatatgcgcggaattttatgcggtcgttaagactgtttacgtttgcctcgaatcgcactccggtttcgaggcgttttgcatcttaatttgattgttggaggagggtgcgcttatgcgttcactttacctgccgtggaaagacgaactgattacgttgataaaccaacgtaacggtagcgtgttcagcaactccgatctcactttaaccctggataggagttctggtgctaacagggcaaaagtgatcgtcacagcaaatgaaggaacaaggtggtgtggtgaaagttttatcacttacacacgacgtgatatcgcgaaagcgtttctagggataccgatgaaaatcgttttggagtcggttgaaacaacaactataagagcggttattcaagctatttcagatcagtacggattcatctttgaaaccgatgctgattttgattcagctatccttgctactgtcattgattttcgtgacgacacatccaagaagatctcgattcccatcgcgaatacctccatggtttggcgtgggcaattggatcttatcgtgacaaaccagcgtgatacatcaccagcgtatctttgcgccggtgcggcaactgtcatcggtgatgtcatcactatttacccgggataaaacgccatgagtacaacttataaaacggtcattaccgataaaggcgctgaacgtattgccgcagcgctacttcctgacggtgagaaactaagaatcacacattttgctgttggtgacggaaacggctctacaccaacccccgatgttagccaaacagcgctcgtacacgaagtttatcgtggggaagtttctaacatccacattgatgttgacgacacaacccggattgttgttgaaggcattattcccgccagtcaaggtgggttctgggtgcgtgagatcggtctgtacgacgatcagggtgaacttgtcgttgtcggcaatgcgccagaagggtacaaaccactgccttccgaaggggcaggacgtgtgttaaattgtcaggtatttgttgtcgtaagcaataccgatgcgatcgaattgaaggttgttagtgacgcattcttaccagatgcgaccaccgagaaacggggattaacgatccttagcagcgaaacaaatagtgacgacgaaaccaaagccgcaacatcaaaagcagttaaagctgtgatggatgttgcgaaaggaaagtacacagcagtggacgctagtaccacacgtaaagggttagttcagttaacctcggcgacgaacagtgatagtgaagtactcgcactatccgcgaaagccgggaaagtcctagcaacacaaattagcgctaaagcggatctttctagcccggcatttaccgataagccgacaacaccaaccgcagccgaaggcgataaaagtcagcagattgcgaataccgaatttgtgatgcgtgctatcgcagcgcttgtcggatcgtctcctgaagcgttggacacactcaatgaattggcgcaagcgttaggtaacgatcctaacttcgcgacaactgtaacaaacgctttagctggcaaacaaccgctgaacgctttgctcacagccctttctggactaacaacatcagcgaataaattaccgtatttcacaggtgctgataaagtagcgcttgcaacgatcacttctaccgcacgcgctctcttacagcagtccggtgttgaagggatgcaaacgatattgggaattaacgcctcgtcgttccgtcgtttcagaggacaactcccaaccgatgcaaacctgaatacctacggtccggttgaagcgtctgtgggtatttggtccaaacaaacatcaacgaatgccgatgctgcccacaatttccctgaagcaaatgctgtaggttacatcgaagtgctcccagccggtcaattcggtggaacacaacgttacacagtacgtacaggaaacatatacgtgcgcagtttaacggcatcatggaacggtgtggatggtccatggggagaatggttaaaagtcggtaacgtcgctgctacagccgctaaacttgctactgcaagaacgataggtggcgtcagcttcgatggttctgctaacatcgatcttcctggtgtaaataaagccggtacgcaaaataccagcggtaatgctgctacagcaaccaagctacaaaccgcccgtaaaatcggaggtgtcgcgttcgatggcacagctgatatcgcattacctggcgtcaatgcagctggtaatcagaatacgacgggtaacgctgcgacagccacgaagttgcgaacagctattacgatcggtggagtttcttttgatggttctgctagcattaacctaccaggtgtcaacgcggcgggtaatcaaagcacttccggaaacgctggttcagcaacaaaacttcagacggcgagaaccatagggggcgtgtcctttgatggaaccgccaacattgatttaccaggtgtgaacaaagcaggcaatcagagtacctctggtaatgcggctactgccacgaaactccaaacagcacggaagattaatggggtcgcctttgatggtacaactgatattagctttagcattaacgcgctcgcttccaagggacgagtcaccgctttagctaatgcgacccagggcagcaatacgggcatccagatgtatgaagcgtacaataacggataccctacagcctacggtaacgttgttcatcttaaaggagcaaccgcagtaggtgaaggtgagatccttattggatggtcaggtacttcaggcgcacacgctccagcttacctacgttcgcgtcgtgatgcatcagatgcgaactggtcggaatgggcacagatctacacatctaaggatagtatcccaggtgtgaatacaacaggtaaccaaaacaccacggggaatgcggcatccgcaacgaagttgcaaacggcacggacgattggtggtgtttcatttaacggaacggccaatatcaacctacctggggtaaacaccaccggtaaccaagacacgaccggtaatgccgccacggcgacaaaactgaaaaccgcccgcaccattggtggggtgtctttcgacggtagtgcgaatatcaatctgccgggtgttaacgccgcagggaaccagaacacatcagggaacgcagcaacggcgacgaaactgcagactgcgcgtactatcagtggcgtagccttcgacggatcgcagaacatcacgttaacagcgaaaaacgttggcgcaaccgcatgcccgaccggctggttgatcaccggtgataataacagctcgattacgacctcatcgtttatcacgttgttgcaaaaccaaggtgcattcaatacccgcgcctgggtcgcacgttgctccttcgcagctgccgacagcgcatacatcccagacagtgaaaccaaatgtggtattattcctctggctggtgcggttatcgaggtcgttagcttcgggatgacgaactacactatccgtgttaccaccgcaaccacgtcttccgtcagtggtgcgaaaaccaactccgagttcatttatagctacgacaactataatggcagcaccaacagcccaggatggcgtcgttgttataacagcaagaactactccgttaacttatccgattttgtcaccgaaaaccagttaaccggttacaacaataacctggatattattgccaatacgttggtcgtgagaaatgggagtaacggcggatttgcggtatgggacattagcactacaaccagcggggctaatatgtatatcagtcctactgctgggatcaacaatgtgtttcgttcaacgtcgtcgcggcgctataagaaagatatcgagaatatcacggatgaacaagcggataaagtattggagatgcgtcctgtctggtatcgttctacctgcgaagccgacaacaaggattggggttggtatgggttgattgccgaagaggttggtgagatcgcaccacaatacgtgcattggcgtgatgcaaccgaagaagatgaccccgctatcgtttcttctaacggactcgtcgccgaaggtgttatgtacgaacgtttggtggttccattaatcaaacaagtacagaagcttacggcaaaagtggaagcgatggaagaagaacttaaagcgctcaaaaagtaatcatcaatccttatggaagtcacttccgttaacacataaggaaatctaatgatgaagaaactttgtgcgatcgttcttggtatgttgatggtgctttctctgggtgggtgtgctacgctggaaggtttaccgaacctggataaagacctgacgcaactggtgggtttgaaaccagtcgagaagaacagcaatctcgctgtgtattcttgctggggtgcaacccaggaattcgaacattggaaaccgaagttctcaaccactgaaatctggaacgataaagttctggttgtggacgaaggtagtcaatttaccgttgactctccggtaaccgttttcgagtccacccagttgtataccacggtgaaagactacgttgacctggggttcaataccgcaaccagcgaacgcttctaccgcatgaataaaccaacattgtcttacgcaagttcaaccctgaactcgaacggcgatggtgttgggatggtcttcttcaattgttctaccgaccgtgcattgatcgctgatcccaactccgttgaggttatcagtaagtaattaagtatgctcctccttcccttacgggtaagctattctggaacgcgtcagctaacggttcaatgggtaatattgactgtgatagccgtaagcatacgtggaaaccatggtcggcgggtaatctctcggcacctattagaatgtccgacttacaatcacatccgttctttgttattattgaatttaagtaccgatcaacaacgcactacgttaagcttggttcgttccagatagaatcgttcaatatatacgaaatggtaccaggttttccgggatgggcaggtaacgtgatgagtcaaaacggtaaggcggtgcccggttgggcttcgcagcttgtttcagggaactggttgacgtcgtttgttggtggtaagcgatatctaaattcaatttaaaaagaagctgctgttttatcagtgggcgtttctgtatgtattacctgacgacaacacgcatccgatatccgccacctcaaccaccaacgtataggacaacaccatggctataagcacagataaaacaccgaatagtggcgcacgtttacaagatggtaacgcatggtacgacaacaccgatgcttactacaacaccatgatctgctggacgttcgacgttcgtgatattgcgacacaagtccagaacaattatcctggtaccaaatacctggaatcgataaacggatatgtgaacgcaaaagaaaagaaacacggacaaggtaccaaccctgttatcattccgaatattccaccacagcagtttacctcacttaagaacatgagtccgtcgctatggtggaacgcgggcggacgcggtaacaacggtaacgtatattgcgactcgcgtagccatacctggcagccatggaacgcgaatgcgaactggtcagccgtccctgtgaccgaattgttatcgtctccgttacctgtcgcgtttgtctttaaagcggtttctggtaaacataacgttgcggtatggaattgccatctctacaatttaactttctattacatccgtcccggattccctggttggtgtggtaacatcatgagccagaatggtagagccgttccaggctgggtatcacaactcgtcagcgggaactggttaacttccttcgtgggcggtaagcagtacatttaattctaaagggctgaggtttttaatgaagttacatgaaaccgcgcaaaatgaaatactaagattggtcaacgagaaaaacggactttctcttactttcgacgatgttgaatttgcacgtgttctatcggcacccgaaacaacctccattctttttaaagggaaagatggaagccgatactacaaatccgtattcgtctcgttggttaaacgagacctcgctaaagcgttcttgggaatacctgtcaagattatcattgaagaagatacccagttacgtgaaatcatgcaagcggtcgctgaccgttacggcatttcctttgacctcgcaaccgacttcctacaaggacaattaaataaaacgacaacaacgtctaccacaggccgacaatctgttaaagtaacagcggatgagggaagtttggtttgggcaggcgatcttgtactaactgttgaaaaccgtaagtacaacctgttgtcgcttattcagcatcttgaccttaccggactgaaatatcttaacgacgatagaacgaagggtgatgttgagttattgattgctggtatcgaccctgatcgctttgtaggtcttgcaaacctacaacagggtgaagctatttaccccgccttagcccatcgcatcgcggatgcgattcgtcgagaaaacgcacctgaagatatcggtttacccgcgctgcgtgggttatttgaaaacgcaacggtcacgaaggtggaacgtacggacctcggtgacgcttacagtgttccgattaatacgaacgaccattatcaaggtactgcagtattccatcttaataatggcaaccccaaaggcgcaccaacctaccgctacgcaaaaggtacgcgtaacctctggcaaccgatgtattggattatcaacggtcagtcaacagagaacttcgcggttgtcagtgaagacatggtacttaatgcgtatatgcgatgccataccgctaacgggttggtcgggatagaatggcggacaacggatacgctggatcacggttgtattgcgtatgatcccatgacgtcgttattcggtttgatctttaaagcgaagatcacgtttactggcgatcagcgtaactttgcagataccgaaaacccgccggttttaaccgtcgtacacaaagacgatagccgtcagtatatctcattaacccgatacgccaccgatgtctctgaagacggtagaagcgcaatcgtaacgatcgatttcaatgacgcaatggcggggttctatgctgacgagcctatcgaactcgaatcggtagcatcgttgatgttcagcatgagttctcgacattataaggaaggtgcgactgaaacgacctatctggaaacgccaatcgacctcggtttaaccctcgagattcttcctatcgatggggtgtatcaggaaatgacggttaatcgtcaccactgtacaccacacgaacttcgtgcgataaccgcttacgatgaccattacaacatcacgccagagcgtgtatttgagaacctggtttatgcggggtatcaagatgaattagtgcattatgttggaatgtcgcatttctacgatactgtctggacgccaagtgcgggtaagttactggtgaacaccacggatgtattaaatccaccctgtatcgcgtggcatgaagctttcgccgcatatgctgcaaaacaccatttctctgtcaccatcagtttaagttacgaattgatgagtacagcatgtccattcgagtgggcacagcaggattgggaagggactatcgcagcaaccggatatacgccaccgtcttggttgctgtctccgtgtaaccaatatgcgatggcatggttaggggatgtgttaacagcatttgctgatatcatctatcctcatgtccaggacatttgtgtacaagtaggtgaaccctggtggtggatcaatacggcgaacaacaaaccgtgtatctacgactaccaaaccaaactggctttcaataaccaatatcctgacaaatatgctgccgacatcggtgatattaacaacccgttatccggtggtgactacgatctctacgttgagttttgtaacgaacagttaggatacagttgctggaatctggttaaccgggtaaaatcgaaatacacacagatcaaaaccggtgttcttccgttcttgccgacgatcatgtcgaatgcattcacggagaaactcaatcttcccaaagcgtggtataatccagagaaattcgatcggttctattcagagtgttacgactggattattgaaacgcatgtcaccaaagctgagcaagcgatcaccattccgcgagatacgcttggtttcccggttagtcagattcactattacctgggatttgttcctggtgaagatcttgcaccgctttatggtttcgatgttaaaacgccgtataaacgcgaactctggaaacgtatcatgggtaaccacgcaaataacctggatatgttcgaaggactcactcagtacatctgggcgtatccgcagttcatcggtgatagcattattcccggtcaggttcccgaagagttttatttcctcggaaaacgttatgatatcattcgtacggacattccttttgattttacgccggacgcttaacacgttggaggtggtgtctacatgaaagtaaaagacctttacaaaataaaaccgcaaacgatgggtaccgcgagcttggttctcgttgatggacgctccctggttgatgcgcttaatagttacgacaacatcaacattcctgtcggtcaacgattaagcatacagcggttaaaaaagcatctcgatgatgctggattagctcctgacacacgaaaagaaatcgaagaattggaaatcgatgaaacgagttcagttgaaggtaatcttcctgatcttaccgctattcatgataacgctaatcaacccgctgtccaaaacttcgttgttgtcgttgcaacaatctcgctctttttagtgacgctagtatacaccggtatctgggcatggcttgcgttcatcgcgcaaaccaaaccgagcattaaccatctgttcgttctggccgcttgctggacgatggtgatctggaaatcacaaggcatcatcagtcgcgaacgtcgtgatttgatgtcggttatcgtcggcgatgcgccaagtaaaaatcgcttttgggataatatcgaaagcctgggtaaagtgatgaagaatcgttgagggtaacacatggctgataccaccccaccatggatcgatctgaatgtgcatcttgtctggcgttacgctggacgttacacccacgcgcacgattttaatgacggtaaacttagttattacagcatcgcttttaccgaagcacaaatacgtgcgtggttcgctcaactgaattatcccaatttgattgcaaagaaaagctattcaatgtcaagaacacgattaactgtgacattggagctgttcaataaatcaacatgggttgatgcgtaccggcttcgtgaggttattgataggcagttccgtaaacatcgccatgaagtgccatcaatgccgaagaaagatcctattgttccaccggaagatgccatctggaacgaacattaatagcataacagcataagccctctcccaacccagcagggaagggagagggttatgttaccgttgcgttagaacaagtagaaatgaacgttcggtacggtggcaagatactgtttgatttgtgcgcgtacccactgaggctggattgtttcggattgtccgtaaccgatattaccgcaaccagaaccaaccggaggaattgcaacgatcagcggttcagccggacgccgatatgagaagccgtctctttcgaactgaagctccagtaaccatgcttttaacgccagtaaaccgttaacgatatactcgcgtcgtgttctttcacgccaatccgattttgatggaaacaacacgtaggtgagttgatcgttatcaccgtgttgatacgacacgacttcgcccaccttaaacccatcttgacattgcttacggtacgcttcaagaagaccgggtacacgatcggctgcctgtttggcaagaccacgtcccatcacaccgacggtgttaacaggaataacccgaacgtcagccggtgtttcccaaatatccaacccaatcaaactggtaaatctcgccattttattttccgtttcgtaaacgttcttcttctcgtcgtaacttgtcctcatcgtcgtccagtaccgcactacgtttccgcagttcgtcttgtgcgattttgagtaccatttgcgcgtaaggatacggtgcttgtaaaaacgcatccaacgtcatgaactctttaataccgaatcggacataatcctcgattaagggtttaatccctaatctgtcccagggatcttcagcgggatgctgagcaacccatttcaacggcgtccagtcgttaacacgatcgtacaagccaaacatggtatcgtacgcaatacccatttcgatgttcagtttcatgccaccgtcgcctttacgggctaatagcaattcccagattttttcatcgttacgaacaagttgtccatcatgtaacccgtatcgcggatcgattagaataccgcgtccatcccctcctgaagagattggacggagtttagggtaaaaaagctggggtacatccaaagcaatcagatcgtagtatttctggtcacgcagattgtcagcaatatcggcattacatttcggacatttccaggcaggcatcgctgcgagcgcaatcgtcgaatcaccgatgaattgcatcaacccgtcaatataacgttcacgaaggtcgctgtctcgtgacagctgtgctaataccgttgccgtatctgcatcgcttacacgacgcatggtaccgtttactgacacgtgcatcgatttgatccacgcatcatactgacgcatccagctatagaactgacgttcacgaataacacgatcacgctcttcttcggtcattgacggacgcgatagaatatcacgcagatcttccagggtatcgcttaaccagcgttcgcccatggcgatctgacgtgaaatcttcggtacttcaagttcaatgataacagaaccgttgtcggacagatccagcgtacgggagtttgtttcacccagttcgtttgcatactcacgcaaaagttcatccgtcatgaccggaccttcggtcatgatctgtcgcatacgtttggttatcgcgctgttgtcaacttgatagagttttgcaaagcttacggtatcttcaacacgatagtcgcaggtttctggattctgatagcaggtctgtacgtaaggatatccgtacgggtacatggttaccagcacgttcagcaataacgctggaacatcggtaaccggaataatgtctttcaaacgctggatatccaggttcggtacgttggccatgtagcagcattctaatgctaattcgatagcgtgcttcatggtgataatcgaggttgctgaaaacaggaaaccggtactatcacgtccacccaggattttatcgcgtgcaatacgttcgtgcataattgcaacacgttcatttgacggcggattaaactgcagcttaataccgctatgccataacggcattaccgcaggcgcacctgatttcgtattacggatggcaaaatagatcgcatcggttcctgtcagcggcgcttcgacatcatcagggatatggttcggttgtggaatgccaggaataacgcgaccaacacccgatgagtctacgggtacgttagtccactgactgcccttacgttccaaggcgcgatcgtgagctgggccacgcggatgatattgtccatcagcaaccgattgcaccaccgctttactgaatttatcaaattgttcgtctgtcggtttaccgcgttgagcgacaatggcttgcacggtatccattgcttcgttgatgtattcccggtaatacgttgtctgcacacgtggagaatacagcggtaacaccaacggctgacgttttgttttcttcggactcttaggacgaatgtcttcgcattggaaacgtatcgttgccttcgagaaatcgaccagcggtggatgtgatggttcttcttcacgggttgcttctggagccactacttcgtctttactttcctgctgtgtggaaccaacaggctcggaacttgccggaatcgttgtttcaacggacgactctgaacgctcaacggcttcctgattcgtcacgacttctttttcttgttcgctcatgcttcggtggctccttgagatttaacactgttagcgaatcggatctggttctccatcccttcgacacgcagctggcttaggcgtgcaacgtcaggacgcagaatatcggatgcgcgttccaggatgttcattaacgacatcccgtagttgtactgtaacagaatactttgttcatcaacttctttaccgtacatcggcgtgatggagttcttgatcgtcgtcaactcggtttgaagttcggtcagatctttattcgtgcttgttgataatgcaacgaactcatcacgtttgttttgggttaatcgtaaacgacagggttgcgtcgcttggtaaatagctgcacccagggtacctaataacaattcgcagttttcgataggttcacgtaactcgtcccaacgaattgctgttgtttcctgagctttagggtttcctacggattttttcttggtttggatgaaactggcatgggatggttactcctgattaatctaagttggcgtaagctggtagtttcttcaatagattatgagagctagtagacatttaccgcatcggagtggatatgattgattccgtcttggctttgttagaaggtaagatccctgaaacaaggcgtacgctgttacagcactgcatacatcgtttataccaagattttaaatgtgaacaactggaaacgttctgcagtacgatgttgtcaggtgctggggaacaatacgatttaaacgaattagacatcattttaacaaacggatgtatcgaactttataaacaacaattgcttgccttcgggatccgaattaacgaagggcagctaactctggatagcctgaaatatcttcatgcgctagcgtctacgttattagacctggaaacacacgacgataccgcttttctactcgctatcgttgaagatgaagactacaccacagctgaagcgctagcggaatgcgcgcattatatttacggcgttgatgctgttaacgtaaccccattaatcggtttcgtgcattcaagcttacttccacgcattcaagaggtactgaccaagaagctggagaaagatagcgaaaacgtcgtcgatgaagaaaacgtccagattccggatcatattcgtcgacgtattcgtgtcatcagcgatgcgttcccaccagtgttcagccagtatattgatgaagggggtacgatagcggttccactggacctgctaatgtcgcagtgtcgggatcagcttactgcattacgtcagcaaccgtatgcatacacccaagaactgattgcattcgccttagcttccgatctcgaagataatgaactcgtccctgtcttacgagaacttattaccgcaaacttcccgatggctgaagaatccaaagaagcaacccgagcgttatcagagttcgtttcatgtcacggtgacctgacccgggtttaaaaggagttgttacatggcacctcgtgaatatttcctttacgcgatgcgtgaagggcactaccgttatcttgaatggattaacgacgcatttgcttttacggaaggcggcgctgagaagtatcagcctaaattacgtcgtcaaggtaacgtcgttacggttaccatcgacggtgaagaacaccaatgggaaaccgagccaacaaaacccctgttgagtttctgggagccattggagcttgcacctggtgatctaccgtcggttaagaatacaaccaccacaaccttcggtgaagcgttgttcaatatgtacgtcctttatgatgctttcggtattcagattgaataccaggcaggacggttgaccagcggtacactggagtcactgattgcgccacgcgtcgctgacgatcctgaagagggaatacccgatcctaacgaacgtccaattggtccgttgtacgcaagcgaagtgaagaaattcaccaacaatattagtgcgttaaccgctatcaaccgtttaattgttccatcaatgagtgataaagcgttaacggtcgatgatgatattattgcctatcgcgataaagagttagcacgcttacaagaggaaggtaagttcacgcctgaagaactgatcaaactcgaagccacgctgaccaaaatggataaggaatcctttaagggtgatgaatcggaagggttctatattaaccccggtaagagtttcggtaatactcgaaagaaaacgcacatcatgatgggggttgaagccgacttcgttgaccctggtaaacgtaacgttatcacacacagcctggctgaagggatgcgtgtcgaccattgggcggagtacaacaacagcgcacgtgcaggttcgttctcacgtggcgcactgaccgctttagcgggacagacggcgaaagaatcacaacgtgcgacacagaaccttaaaatcacgatggacgactgtggtacccacgaacatattctgttcacggtaaaccgcgatcatatcaaagataagctgcttgtcggccgttacatgatcgacggcgcagcgcttaaacttattgatgctgaattacttgcttccttggaaggacagaccatcaagttacgtgatcctcaacgttgtaaagcaggcccactggaatactgtgctacctgttgcggtaacgcgatggctccaaccccagacgcgatcggggcagagatcaccggtgtaaacaacgttttcatgaacactatgatgaaagcaatgcataacgccagtgtatcgttagcgccttacgatcccgaactttatattagttaaccttgttaaatgaaaggaaataaacatgagcaagaataaagaccaacgttctgcaaaaatggacgaggagattactgcggtagaaaccaccgttgcagatgctccggttggtgatgttgtagcacagccggaaacggtcgctgttgagaagaaggaaaccgttgttgaagaaaagcctgcgaaaccagcggtgaaagaatcgcctgctgtttctatcgtggcttctcgtgccgcaaccctggttgccccgttccagaaatatgcggaagaaatgggtccgaccatgccgcaagcaccgcagtcgttgatccgccatcagcggtctttaatgtctgccttccgtgcgttactggatgtggataatcctgaggttttccgcaccgcctttgctgatattctgaagatctggaaagataacagcgaaggagcatttaatgcaaaccgttatctgtatcgtggcatcgataacatgccgctggactaccatacccgcatggctttcctgacagtactgcgtctgatggatgcgatctatgatgaaagccgtcgccaggttgaaatccgtgctatcgaccttaatatcgcaattcctgaaattgcttacttcgatacacgtaactatctggcaggttacatgcgtcgcttcgcataatgcctaaggcgacgttaacgggattactgtcgttacgacgtaggaggtgatcctgatctccctcactcgcggggtgatgcgataatcgtcgtgagcttgtcgtgagagattctcattgcggtcataaactcttcccgccccatataagggcagggaagggctttatgccgttgaatttatcctgtgcagaaaataaaaataggaaaagcactccatgaacgaaacactcgaacaacccgcaatctatcgttggacatccgtttggaattatgtttcttttagcgttgacaccgcaatgcaagctgtaatggattataagaataccggcaaaacgaacgaatggttagtcatgccttgcggcgaccttattcgtactgaaggaatgtatttccctaatgccgggaaagaccgccgtatccaggacaggatgcgtacgacgattctgacgaatggtgacgtcatgatcgaatgttgggctgattaccccattgatcgtgaacaccaggatgaaatataccagcgtttacgcgatgaaatggttgccgcaacgaagcggtattcctgtcgcgttaagctgtattgctggttaaacggcattgccgtccacgacatttaatctctccctcttcccaccgtcctcttgaaggatgtgggaggagggttctatgctgttttttatttcgtgttaacgcagtttatttcgcgactacattaccttagtgataagagcaaaatatcttatcatctatttaagacaattgcaaccaatccaatataaaaggatgtcaagatgttacaagctataaccgggcatattaccgctaactatatcaccgttgtagaatttctgcgtaaacgaaaatacgaaaaacaaaacccaattcttgaagatagtacatacgaaacaaaaatcttccgcgtcaatcgcaatacgaccgtcgcaacatctgaaacaggttacactgtttatatcgattgtgatggcttgatccctaacgttaaagcacgtgcggcaacactgttaaaagtcaaagcattgctagataaaaacagaccacgcatcacaggttttgacggcaaagacattgcttttgtttatcacttcgacaaacgttattcatttttccagtattacagccgagacggtctgttaacgcataacggaccggcggttgagatctacagtcgttatgccttatatgcatcactgaattaattttcccgcgtgtgtctgacgttttggtggggttcgccccacctttttttacagcttttcatcattaattgaactcaagagaatttaaggaattcgatatgtcaattacccaattcgcgaacagcattcgttccagtgaaaccaccgtacagctccttaaagacgagctgcgtaaagaacatgaaaccgcagccaactatctgaaagaaatcgaagcgttagtttatcgtgaactggataacgtagaacgtttcttgcaggcgggtatggatgaaaacatggatccaaacaaagaagtgttaaagccacgtgttgacttttacggttcagatatcgatcgtgcgattattcgcatgtaccctaacgattacgtcaaggtcgacctcaacccaattgtaaccaacatcaatatcgacctgaaagaaaagatcgatctgccgaaacccgatggagatatcttgcacgcgatgaatgcgatcccggtactgaaagcatctatcgtcgacacgctcaaggaacgcaatgaacgtcgtctggttatcagcgtggattccgattcggtttctttttcagtctacatcgatgctgacggtgaagaaggaaatccaaaagacgtccatcgccagcttgctgagtatatcggtgagagaccgagtttcggtatgggttccatgatcgtcaatatgctagaaagcatgtaagcatcccacccccaactaacatttagattaagaaagaagtgaatatgaataagaaagtcgaaatgcatggtatttgcggacgtcctgcggaagcacttaaaataaaggataaagtgcacgcccttctctactcagtgcctgacaccacgctggttacgtgttgggatattatcgatcagacgatactaaaactccaggcgaatttaataaacgatcgttgctggagtcccgctttgtcggttgacgataaagtctatctcgtaaacgagacaaccgataaagataataatcgtatcgatcgctggcgttttgcgttgcacgacaacattgttagtatcgacgttatactgagtataacaggtgaatcgtgtattgctgtcaatgaagtagcggcatacgccaaactaaaattagcacaatgttttcattcgcgtgtccgaggattcgatatgcccgttatactaacaatcaacggacacgacggttcagggctgttcgaattccactacgatcctgacaatgaaaacacagaagagtaattaatcaacgatatcgtgtcccttgttagatgggacacgtatcggttaaaaggtgtcgaaggtgttaaaaaatgacgacatgggattcttacggtgagcagctggtagaatcgataattaaaagctttgaaatactcgaagtaagattgcaggaggacgggtgctgggaattatttaacgagcccgattccgactccgaaccttacttctacaacctatccgttccatcaacacaacacggcaatgctacgattgtagatatcaccgatatcagagtttacaataatcgtatcgctgcgacagcacaattacctttcagcgtaaacgggcttgccgcaaagcaacttctaatgtatacagccaacgagacatttggtaaatgcataaagtcgcacggtatctcgttccccctagcgatcgattatgaattatcggacggctgcaatctcgttacattggaatatgagccggataatggaacagcgagtgcagcactcgctgttccgatgaagatgaaaaaagaggtatgataatggcaacggtttattcattcaaatctaacgtcaacgaacttttcgacatgcataaagacacgtacgtcgtacaagttgctgaggtggtcacgcaaagcgttgatatcctcaagaaaagtctacgcaattccgatgaatggtcagtgggaagtagcgatattgacgggacacatttctccgttgtaaaacgtatcccaacaatgactttaactggggtacatttcgacagcactgtcgtctttactatttacaaacaccgtatccttattaacattaaattcccattcatagcaaaaggggagaataccatacgtcggttatctgatgttgctgataacgcatttacgaaatccgctatgccgtgtgatttccctattacagtagcactcaagtttatcgacggccgtgaattccactatgtggaatatacgtccaacgaagaaggaactaaggagtaatcatgtctatcagagataaagttcaacgattaatcgaattcaaccaacagtgtcgtattgatgaactcatcaatttcgtaaaccatatattcgataagtttgaagaatcgttaaacgacgatatgtgggataccgatatcgttaacggtaaagcgtatcttcagaaaaccgtcacggatgtcgatgaaacacaatttctggaattcggtttaactgacgatggtgccgttattcatgcattattgcatccgtgtttggacaatgtcgacgcaaaggcatacaagccgtgtttagctaatgctttcgaaacgagaacagatcaatatgaataccctgttcgtttagttttatgtttcccttctgaatcgaatgctaataacgcgataacattcgacacgaaggaactattagcagaatacgatcccgataaagcaagggaacaaacctattgtatcgccgatgaattcatcaaaaatcacgatgcgttaaacagggtatcggacccgaagaaaggatttgtacgtgactatacatgcgggccattacgacgacttgtcgtaacccagacacccgatggcgttaacgtgcttgggatattaagagatatgaccatcatcgataacgatgatgacggattaaggaaaacgttagatacccggttagtgaactgtgcgtttaaatacgatacgacagttacgttcacgctctgtttccatccggctttcccatcgtgggtaacaactgtctataaagaaagcaaaaataagtaatatttccaaatcgataacattaaggataaaaaatgagcattgtagaatccatcgttaaagctgttaacgacaacatcgatcatccgcgcatttctaccatgatcgatattattaaacaagaaaaaacacctggttcatacattcgttttacccgtttggatagcagcgatttacttttcactgtgaaaaccgaggttcacgagcaacgtatcatcgtagaggtcctggtaaaggagaacaaagaactagactggcactctgttcgtggtgacagagacgcgagaaatttacttaaagaacatctctgtaaaatggaagagaaatacaatatcccatttagcttagaggtcaatcttttcccagcgtacctgctctggtacgtcagtagtgagaagcatgtcgaaacgacaactgacgtcaaagagtaaatatacgtgatcaataacaaactagggattaaaaaagatgaacgttgctgattccgtcgctaaagcggtcatcgataacatcgaccattcgtatattcccgccatgatcgatctggttaagcgagaaaacgtatctgactcgttgatgtgctttagtcgtatgctcgaccaagctatactcgaggctgtaaacgtcagcgtacatcgccaacatgttctcttcgaggcgtatataaagaacgaccaacatcgattaggccaccacgcgttacgacacggcgagaacgcgctggagcagctaacgaaatgtctttatgcgctggaagagaaatataacattccttgctctctagaggttaaccattacccagcgtgtcggatttggcgtatcgctggtaagaaaggcgcgacgccttcagctgattgcgaagcataacaacgtagcatagccccttccctagccatcaggccggggaagggttgtatgccgattataacaggaaaagaaatcatgaacgagaaaaccaaatcgatgaaaaagcgcttagatcgtctattcaatggtcccacgcctgcatccgtcgttgaggatgttattactcaagcattcgaatgcgtggacagaggtcttaatagtatccttgggtggtatcagaaagaacgtgaaggtaagctcgtccagtgctacaatgaacgtcactttgatgatggtggtatcagcggcgattactttatctatttatttcccgataaaatcgcgatcaacatcgaattcgataatgcgatgaacgatcaggaaataacatcgatgcgccaagccgcaaaacaaaccttcggacgttgcgtggagcaatacgatcccgatgtgtttatcacatgtcgtattttcatcgagccgagaaaattaattcagcatatgtcctacggcaccacggatgacgatatctaacgaaggtgaacaacaccttcaaacataaatcaatacatcgatcaatcgacataaccactaggagcattcaatgaacatcaactttactatcgaatccggcgattacatgaacgatcgtgatatcatcccattctaccgtgaggatttccgcaacgctattcttaaaacgattgaggatgtcttggatctcgctgaagatcaacttagcagcatcacccctgaaacacacgtaaaagcacgtgacgaagctctgggtgacttgtatatacctaaagcctgtgatcgctgctgcttcactgatttcttcgtgtctacgcaagcggtcgttaccgacgatgggaagcatcacgtgatccttatcttggcttctcatgagcctatgatcaatcacgcactttcttttacacccgggtacatctatgcccttgcaaacaagccgatgatcaacgaaatcattgctgacatccttagtaagatttgcaaagaacatggattcctgtctattttcttaaccgacgctgactacaaagtaacggttggtaacgaacgcgcataaacctcacccctccctccggcttccgccagggggaggggcttcgcatgtgttttcttttttgttaagcgaggatcaacctacttgaatcattcgatggtccgcgcttcctcttttggacgcgttgcatcgaaatgttctaaaagttcaaacatcgatggtgctttataaacgattctacagaagtctacagcgttcgttttacctccggtaataaagttgatacctaacttcctgaattgatagtcagagacgccctcaatgcgtgagagctcgcgaaaaacacacgctctggatagattcaacaggatctgcccattcgggtatgaactgctaatgtcaaggtctgcaacgaatagacggatataacttctcaggttcggcatatcccagaagagatgaatgccgttgtcagccatgagatcgcatggtaatgtgacgatatgtccagctcgtgagataacccacttatcttcttcctgggtcatgtcgtcagcggtacatcccatgacttccccacggttaagataaacgaagaaaagtttatcgcagatacgtttagggttagaactgaaatctttcaaatccgacgctgctaaacggatagggatggtcatcgaatagtcttttgttttctggtccaacgcctcgataccctggttatcccaaaggttatatacgccgtagtcgatttgatggttcgtttgcatctcttcgtgccaggcgagctccgtgaacccttctgtaccaggaattgcttttaatttcgtatgacatttatttcgctctaataccgcatcgagtgaatagcgtccttcatccggtcttcctaaacgaacgaacttataaccacacatcgcatccataacctgatacgtagccatcgtataaaacatcggccaggtttgctcaagggtaaggttggttttacgacctgaagcagataccttgtcggtcttcggtggtacccagcgagcaatacgatatttaggtggtatacggggatcggagaaaacatcctcgggacgatacccttcctcgttcagtgcctggagcatgcgcggaatatcgaacgcgatattccagccaaggagataatccggctgccattcgtgaaccttctgcatgcattggatgaccgcttgtgccgggctttctacgattcgaacatcgtactgatatttttcgaatgcgtggggatcttctttggtattcagacgttcggccaggtaatatcgaatcttctcatgggttttctcaatggcattcggaatatgaccaacgaagtccttggtatagcaaagtatcgcattgtatcccattgtaatagacatacaaacgatcttaccgtgtccgtggacaacgtcggtttcgatatcgaaacaggcaatggaagcgggtaatttatcgacgtattccggccattttgtgttgtactgggtttttaaataacagctggcgctaacgtccgttccatagaggtatggactccgtgcaagctgctgtaaacgggtgttatcgtcagcacgtcttttataaagtaccgagctgatcttttcaaccagttcgctttggcggacatcgtagcgacgcacatgcgagagcttctcgctttcctttttatatttgttcttacgtttactctctaccgtcacccaaaacggacgtttgtaattctcgaagaagcgaaggttcgtcgcttgcgtattatcatcgaagaacatgatctcttttgcgatcatgaggtcgttcttgctgccatcgttcgcttcgttatagctgatgtgtcgacattgaataccgagcagtttcttcttaggttttcgttcttgttcgctcatggcttgataaactcgtaataagtgttaaaaggtgattttctatatcatcctcacgttctgttgtttttaaccgaccactcttattgcttggggtatgaacggtgatgttaccgtcaaaaggtatttctatgaatgccgttgcatagcagcggacacattgtgattggtgcggccagccgatccatgaacccttaaatttacgtaaatttagagagtgtacaatgtcattactacaacgcgtgtatggtcatgacgaattaacgatggaggccatcaagtttcaagatggttccttgttcaaggaaatgaccgagttcttcagaagcaaacagggactggataaaaaagaggttttaaacgttttcaaggacggtcgtttaaccgagatggttaaacgctatacggggttgaacatcgaattctcggtcgacgtgaaaatgggccggatgaatgcctacgtgtacccgccggatatttcgacaaacaacacaatcctggcagactatcatcggttatggatgcgcggtgctgatggtgttacgctccttaagaagattaaagatacacctgtcggttacgtcgatttagaaaaaggtcgtgtttacggtatttttgaagaattgaagattcgttctgccatcacgtatgaactgctaacggcgacagaaccctttcttccggaagaaaaagcagccataatgctgcatgaaatcgggcacgcatttaccttccttgaaacattgtcggaaacggttcgtgtcgaagcctcaatcatgaccgtacagcgtgaactgttggggacaaccgataaggtaaaacgtatcgaactggcgaaagcgttaaacaaaacgttggataccaacgtcgacgtagacaaaatcagtgattcagacgacggtagtgtctggtacacggtttacgtgtctaacagagcgatgcagttaagaaacgtaaacaacgctggacgatataccgacgttgcttccgaattcatggctgatcagttcgctacgcgtcatggcggtggggagtatctcgttagcgggcttgctaaaatgtatcggctttatagcaaagactccgtgaagtccaaaacgatgttctggctctccttcatcatggatgctactatagcttctatgatggcgataggtttagcttctgttggtgctatcggcgtgttggttgttgtcgctgtaaccgcgctttctgtttggttagatccgacatacagcatttacgataacgacatggaacgattccgtaaaatcaaacaagatttaattatacgcttgaaagatcgtgatatcccaagcgatgttcgttccatgacgctggatgccatcaaaacaatcgatgaaacgctgagtgcgatgaacaataatcgtacattttcacagatggttacacttatccttcgtcctggggttcgtaaagcggttaaacaggaagaaattcagcaagtcctttcttctacaatgaacagcgatctgttcaaaaccgcagcgactcttgactccattatcgcctaatctcttctatttttactataaaggaatttaacatgaatatttctgatttcgccgttcagctgaaagacctggtacgtgatttcccagccgaacaacagacccgtgcgctaagtattgccgcaggttatatcgctggttacagcatgcccgtattcgctgaaaaagaagatctgaccgcagatagcattttcgttcgcgaacatctccctaaaatccgtgaagggctggataagctgaacaaggtactggttattgggctggccgatgcgttagacgttgcccgctacttctggtgcctgcgttaccgcatggtgcatgagccgaccgcacctgaaaccatgctgttattagcctccgccgttcgtgaccaagaaaccgcagggctgcccgacgttatcgaaggtgttgatcctaagctggttgcgcaactcgcaacggctttcgctaacgcactgcaaggagagaatgcatgagtatcccagttattaccccagaccacaacgaattcggtttagcaaccgattacggggtggttgaaatgcgtcacggtatgctcatggcattccctgacgaagacatccaaaccagtgatggttcaagcgtcgttaccaccgaagatcaggaaacaatggtctccttcgatgttgacgaattcgtgacctctggtgaagaaaacgttcgtcttcacgaacaattagtaacacgcggtatttctcgtgctgatgtaccggaactgcgtatgcgtcttggtgacgcattcccgaaacaactgccggatgctttcttcacggaaatcccatcacgtaacggcgttgaattggtgcaggaaggattcgttgccaaggtctctaaactgtttgtcgatggcgcgaagaaagtctgggaactcatcaagcgtatctgggcgtttatctttgcaggaatcaagaaagcagtacgatacgtctggaaatattcaaacgttgatacgaagaagtttatcgcaacaactgatgacgtaatcaacgatattgtcgatgcgttaggtgctgattacccacgtttcaaagaaatgttggataaacagatgacccttagcgacgtatataaagagcttgcaggttacggtggtgcgataaaccttaaggaaatcgctgacaaaaatctgaaagagaaagcgaagtcggttgctgaatggcttatggtcctggttccttttgttaccgctaagcagaaggaattcgctgatatcgtaacgacaatgagccgtaacggcagtacgtttttggatacggtaccaaacgtacaatccatcgttgaattcagaaacgctttgaacgattattggaaaaccccggcgtgtgtaggcgtacttgctggagttgttccgttagtttccgatggtacaggaattgttgccgccgctgatatcgtcgaagaatgggtacagaaacatcaaactgaacttcacgatgacgcagctattcgcaacaataaggaagcctgggttcgtgagcttcacgatcgaatgatggagttggctgaaccgtttgacacgtttaatgaagtcaaattcgaacaaacgttaaatgaggccgaacagatcttcaaagcaacgaaggaaatgaacccaacggctgatattcaagacggcgatattgagctgtacgaaaagcacatgaagctaacatatcagacattgcttgcttatagccgtttgatctcagcaatgtcgcgttggctgatggatgtgcaactcgctcatattcaggtagaacaactcgttgcgcgttaccgtgcttttgaactcaagaattacttccttgttcttgagcgtgacgccgactggaaacagatcgtgcaggcattaaaagaacgtgcgttgaagccggtgaacgacatcaaagcggaatatcaggcacagaaaaaagatgttatcgatgtcgataatgaagcgaagaagatcaagatcgacgtcagtgactttttcaaattcttaagcttcgaagacgacgtatccggttgtgcttacctaacagaatctgaccgtcaggcacgcaaagatcttgttgagattgacgaagccatttatcggacttcgcatcgtggtgaggtcagcaaaccagatgagcagatctatctggagctgcgtgaacggtatatgccagaccaagcgttagagccgaccatggaatcgttcggtatcatgaagatggctgttatcggtgtcatcatcacgacagcctacactgcgattcgtcgtctgttgctctggattattgaactcttgaagaaacgtaccgatagcgtagcggccaccgaaaaagcggccaacgacgccatcaagcaggcgaaacgtaacgcgaacgtttatgttcctgatgagcatgttcgtaaagaggttgataaaaccgaggataccgacgcaatgcgtaacgttgttggtgcacccagcaagtcggcctctgatgttccattgactacagaacagaaactttcggctgtttctgcgattgttgatggtatccgtaaggagatggtaaccttaccggtgttcgatcgtcttcagcaagcgtgtacgtctttaacgttgggttatttccaggaaggtaagctggatactattcttcgtgagatgcgtcgtctacgtcctgatcgtatcgtgtatctgaacgaccagtgtaaagaactcgaaggggcgttagaagaccagaaacgcgctaaagaaggcgagattgctccgcgtctggctaacctggccggtaccatgaaacagggtatggaagcgtaccggatgctgtatgataattcgctgactttccgtttcaacgaattgacaacgtctgcacacttaccaccgaaggacttcgcggaattcggtgagaaagtactgcaaagcggtactcctgtgtatccggacaccaacgtacttcagcagttagcgaccgcacttgacggcaacagctatctgttatttacccgttctggtgacgaattcagcaaacttgccgacagtaagtttaaagaaatcgaaacacagttccgccgtttaaatgacgttgctcgccaggtgaaagccgttccgcaagaaaacgcaaccgagcttcgctcaaccgttgattatatcaacgcacagattcgtgaaatcgcagcgtggtatagcttcgaagaagccttgcgttcacgtgtggatgcgttagtgaccgcctaccgcgattacgtcttcgctgaagcgaaaatcatcaacgagaaactgcagaaagccggtttcggtaaattagcttaattgtgtttataaccctaggggaaggctgaaaaccttcccctaggccaacggagtgttttatgaacaaatatcttgccgcgggactctcttcagctgataacggtctcctggtgcttgaatcgttaactgacggtattaattcaacaccgcgtacgaccacccttaacggcgcgtttcttgacgatctcctggcgttaaaagaaacattacactgtgaacagcaagtatcacgtcaacaactgtctatgctttcgttatcgatgccggaagcccttgacggtaaaccgctggcgttatggacagagcttccttccacaaccggttttcgtgaagcgtgtcagatcgtcgataaagccattacgttaatggaaagcaagctgaagcaagaaggcaacggacagctcgtcatattgcttcgacatgaactcgagcgtctggacaaccacaaagaggatggcgaaaccttcaacaccatgatggtcgatctgtctcagcaactcggtgagctacatcaaacgcttcagggggttatcgagcatcccgatgtgatcgaggatatggggtatgccattcaacgtcacgccgacaagcttgctgcagtatggtcgcctgcgttaccaataatcgcacacagccaagcgcttgcgacgcttgtacaagccgataccaacatcctacaacagatgctggatctgcaagcggctgatgtcgatatccccatgagcgtagaaaatcaggatattagcgcattagagagattcatggacggtgatggttgcttactccctattgcgccgaccgattgtccgaccgaatggtcgttaaaagacctattgaactatatcggtaccggggtcttcgcaacacgtattctgcgggatgtttgccagcagtacggtgatgtcgctgaacgtgtaaaacaggttatcgctaaagccgaagggcttgctcaggatagcaccttggatgggatcgcacaactgaatctgctaacccagatgcaatgcgttcgaatcaaatatcagcggatgttcgcacaatcggtacgtgcggccttgctgtttgcacaaacggttggtcagatcatcctggacgttaaagatacagcgattgctgcaaagagcgacgacttctgggataaaacccaggcggaagtagaagctgctgatggctacacacgtatcgatctcgtgcaggaaggtttctttgacccaacgaagatggaagggtacggcatctataccgcagaaagcgcgtgggaaacgttacggcggacaatggaatacaccgtcaatatcctaaaacgtttggttgattggttagttaagagctggcgtaatggaagtgcgaaagcagcgattcagcaggcggaagctaataacagtcagcttacgcgagctaaagacgctctgcttaccgaaggcacgaagaaacgtttagcgtcgctgcacaccgtcggtattcagaccattgcgaaatatgctgaagcaggaacgatctggtcgggagcgttcaaaggggttaccgacaatctgggtaacgtttcggcattaatcagctcggaagtgaaagagctatcgaacggtcgtgaactcgatcaggataaactcgctaagattcgtgaaggtcttgctctggcattcgagaaaggtaacttcaataaagttcttcttggacataacggtatcactatcgataatctcgcaagtgaaatccatgactaccgtgaagaattgaaggatcagttcaaggaatccacgaacgaatctatcgatgtggataaactgattcgatacaacgatggttgccgtaaattcctgcaagggccgattaccgatgcgcgcaacaaggtcagcggacatgagctggataatctgcttaccatgttaaacagcatgattcgtcaacaagcctcatcgcctgaaaataaaggtttaggggctttgaagaacgaaatcgtgaacgcacgcgatcttgctaaagctgcggtggatattctcggtatcgcacaatggttggaagtccgagctaaacgttatattaacgctttgagtacagttgtcgataaagcgaacagcgaagcagcggctgttagcggaacattgaaacaggaagcgttcgatcttaacgaagttgtgctctcgtccaccaattacgatgtttgtagcgtcgcagccacgagtcttgcggcaaacagattccgcaactcgcgtgacgaacttcgtcgtcattataaccaagccctggaggctgcgtttcaagtctataacagggctgtttataaccgtgctgtaatcggacaacatctgttgggtgttatgccgcggtttacgggtgtattcagtaactatccgtggacattaggccttgaccttcaggtgtccaatccttccgcgttaaatgcgttctgtgagaagctttcgcggtctatcgagctctatggtgcaggtactgccgacagcatcacacaggcggttgctttgttagattcaacagaactctgttatgcggtggatccgaactatgaaggcgaatctggtaactcatcggctttagcaacgcatatgttcgaatatcgacgtctggcaaaagaagcgttggaacctcatagcgactttaccactgaagaacaacggcggggatggtacgcaacgttcatggacagttcaccatcatgggaaccggataatactctcccagtggtaacggaagatgttgatccttcgctgatatgggcattcgcgtctttgttctgtgctgcgctgaatgcgtatatcgcactgagatacggtaccgatctcaaggtgtatggttggttcagtgaacaacagaataacactaacgtaagataacagcatattccctcctccttccctgttgggttggaggagggttatgctcatgctattttgttttagacacgaaggccttgcgctagcgctgaactgttgctttgtgcgtgtttcacaaaacttacatcgatcgcttcacgtacggacaagataccatccgctttcacataaagctctttcttcaccgcacaacgaacaccgtcgttcttcgcggtataaacactgaggttcttacctggtccaaaatcatcgatttcaacgttaaggatgtcgtcaccgccctcctcacgaatcatcgcgatcatttctgctttagccaccgtacgggatgtcaagcattcattgatgactttcgacaccatcgcttgaaggacttgacgtaaatccaggtcggcgtattgcttagctggtaagtacagtgtcacgttgaacgataaggcagcaggaagcgtcgtttccaatccgttttccacaataacatccacataccccagcgattgcttaggatacagtgaaatctctgtttcttcataacagaaattcctgaacgtgtcgatatcgttctggatccattcgataagctgcgtaggaatcgcattacggtactcaatcacgtctgtatcgttcgctaacagatacgacgcatcaataaagaacatgtccaggttacgcagaacctcacgttcatcgacggggatcggattaccgtaattatctttcatgatgtcgcctttcaggtaacgataggcttggcttccatcactgtttaatttcggatctcctttacgatgcagatatttaaccgacaacgtaccatcatcgccttgctcaatgataacagaaccggtctcatccgtcgctgggatatcttcatcatacacccacggaatgttctcggtgtaacgtttatacgtgatctccgaggctaccgtacgagaacgcatccaaagaccatccagatcataaccaaaggttgcggtgagacgttcacggtagaaacaatacccattttgaagcgtgagtttcttaaccaggtaattatcggaagcgctgtgtaaaataccgtcgacatcttccggtgcgtaatccgtcaccacatggaatatttccaaatactgctgcagtgatgcccaataatcccgcggtgtcgattcatacatcgagaacgaagtcaatgcgatatatggttcatacgccgtggaatcatcggccaggattcgcgtaaaatcataattcgtggtgatatcgaaagtgaacaaacgacgaccttgttcatcggttgtaggcgatgctaacatcgttgcgtaatcaccctcaccacgcggattgaaccccagctggatgtgcacgtttttatcgtcgagcgctttccatgcgtcgttaccttctacaatgaggcttagacgatatccttcggcgatacgatccagacggtatccggtcaccatagcggttaacgggattgtctcgttcgcgtcgaggaaggcttgtgtgccgatcttaggggcatccaggtaataagcatggatgtcgaaatcgcttgtcgcatctaatacgtaatgaaacggactgtaaaacaacatggcgttgtttaccgcattcaacttcgcatcagagtcacctgcattaatacggtcaatttcatcgtctgacaacagcgtgatacttccgttactgtcacgatacaagcaatcaggtttaatcgtaatactgtcgccgttatcagcgacaaacttacttttcaccaatgctgcagctgacgtatagaaagaccccatcaacgaaccggcttgcggcacgctgtcgctcaattgcggtaaatctcgggttgccaggaacgaacgattggttacgttgtcgatggtggtcaccatcccataacccgcatcttgaagcaccagctcgacctgcgttcctgtgattggtaccttggttttgttcactcccgccataacgcgttcacgttgttcctcgaacgttaacgcggatcgcccaccagacaacgccccctcgctataaatccctttaatgttgaatgcacttagcggcgcactgtatttctgttcggcttttggtgacaaatcgatgtaattatctttccagtcggtcacgtcgtaatcagacgggtcgacgctgattttccctttcgtcgtcaacacctcaagtcgaatggtgcttttatccatcgtaccttgagacaaataaatttcaggaacacgccagttaagtttgttcccttctacttgtaacgcgatggttggtgttaacggatcgtagatctgttgactgtgcgttgtcgctatctccgtccaggtatcgttatccgacgacatatacgcacgacaatggtaaaactgatcttcgaaggtaatactgctgttcatcccgtgaacgctgttaaacggcacatcttttaccagcgttttaaactggaacagcgggatacgcatcaccaacactttacccgcttttacacgaacgaccccgtactcaacttggttactctccaaggtttgcaatgggctgatgttatcggtgttataaacgacgcggatctggtcgtgcgcttgtacttggatttcgatgggataatgtaacccgaaatccattccggctaccgtaaacgctgtcgtacgtggtatcactaacttacggctgtaagaacggctcaaatcatcggaggcgatggtgttgggaatctctacagcgcgatcgaggatttcctgataccctaacgaataaatgatttccgttttacccggcattgcgaaacgtccgacgtacgactcatcatacatccaacgatagagctggctccagttggttgcaagcttcggatacagttcgcgaacacgggactcatctcgtgcgttctggttcgcagccgttgccgttgcaacctccagcagataaacaaacggacagctggggtcaaccagggttaactcgccatcagaggccaaacggatcatatcgcttgcaacagcctgcatttcaataggtgaaagcatatagcgattgagctgttcagcaagatctttgttggttacgctcatttattatccctcgtaattttgcggaatggtggtacggacaagatcgcgactgaacgtatccggtggtaacgccgacggctcaagatccagatagaattcgttgtaatcatcagcgggtacgaaccaaagaagctctgaggtcaacggatgaataaatggatacatatcgacacgatacgacatgattcgacgctcgtagggtgagataggtaccagctcctcatcttcaaggaacgtacgggtatcgttctcaccgtaatagaacatcaggacaagtcgattgaattcatccttcagaatctcatcgaacgcgttgttaccaaccgcctgatatggaatagtgatacgttcgttatcttgcgtgaagggtttatcgatgctgtagttagccatattaccaatcggtaacccgacaggaaacatcgcggtcggtgcgaagatataacgaacatacatcccagtcggatccaggatgatacgatagcatcttgtccagtaatccatttcattgtcgatgatggcctgagggcttggcgtcagttcaccattatgcacgcctgcgatgtaaatcaaccaaatataatgaaggaacatgatggggttacccatgatgttcttgaacgtcgcgttcaggttataaggctggaacatatccactgaaccgtcagccatcacaacggtttcttggcgtaatcccggtttaccctgatagacctgcatttccatgtcattgaaaccgctgatatccgtcaggttgtccgtcagtatacttatgaatggattgcgctcatcgacgatggcacgtcctcgatggttccgctttctggcacccacagggtccaagtagtcacggacaacagcctgaatactgttagggttatccgtacgtaacgaccacaaacgtcgatctcgttttaagttcgcgtcggtaagatgtaaattaggtcgtgtgaagaaggtaataccggcatgatcgcggttaatcgggatcgggctgttaccaggaataggcgacacattccgataccgtctggcgatactgtcctcgtatgtcccttgaccgacactggtacgaatattcttccgcgctattgcccaatccgaatcagtgaataacaccgcattgcccgctgcctccacagcttcgggtgttaacgacgcattattctcctgaatggtttgaatagcttggtcgtagtaattagacattttctttcctttatttgtaaataaggatttcaatatggtagcatcagaaattgccgacgctgttaatgttgttgcgtcaggtatcgctaaagtctacgaagttaataaacttatccagccaggttcgctggttgaactctcacaaccttcacgcgttatcgcgccgttgatctttgaacgtgagttgtattatagcgacgcacgcaatgcgttaggcaactgcatgcgcaccgctgaaaacatgtataccgggttctatttactggcgttgaataccatcatgcaggtgggtaacatcagtgtcgataaaacgctgggtcgtgtgaacccaaaccgtaacgctaacctgatggataaggccgttaaattagcgctggaaagtgcggatagcaaaagccttgttttccttgatgacaaaggattcaacctacaggggaaacaaaaaaatagcctcgatgttggagccagcgacgcggcgatcgaattgctgaacaaagatgcaaacgcggtcaccggcaagttcttaaccgtgacgctgaccgatggtcaggcaacgatgaaaatgccgttgaacatcagcatgcgtattgcaagctctccagcggaagtgcttgcgtcgattttagcgattggcggcccacagaacacctggcgagcacgttggcatcgcatgatggccggtgagctgtctttctggagcgatatgatcctgcttagcgatctggttcgcgaacacaaacgaatctcacgcatggataaagagggtatccgtaaggctgttaatgctgcgcgcatcaatgccgcaaaagctgcagcgagcacaaagatcccttcttctggagccatcgcctccacctatatcatctctaaggctaaccaggaagccatcgagcgtaagatcggacgtcgtttatctgattataccacacgtcagaaagtcatggctgaagccctcgcaatgcagttgatcatcatcgacgaagctgaagagatggtgaccttctatttccacagcttggatcaagggaccaccgtaagcttcaagcagctggaaaaatccaacagttcgtcaacctcgggttccgatctcctgacgatcctccaggcgctccgtaccggaaacgtcccacagattcgttaatatacgcaacctgtttcgaaatagcataggtgctcactcatggcaatcgattttaaagaattcattcgcggtttgaagccgctttttaaacgcaccggtgttgctgacgcacttgaatcaatccgtgacgaaatcaacaacaccgcgattccttactacgagacatccgcttcgcttctccaaaagggagaaagcgccttatggaaacttgctgataaggatctgcaccagcgtttaacccgcgttcgctctggaagctgggtagaaaacgttcacttagcgctacgtaatgctgttgatctgattccagaaattgttaaacgtgttaacaaaaacctggaaatcgatgttgctgctgacggtctgagtttcaaagaagccgctctggtacgtcttgttgagtccctgggcttctacgttagctacgctcgtacgctgcttcgtgcgacggtcatctgcgaaagcatgccaggtggtgataaagcacttggtgagttcttcaccaaaaacgagattgcttacctgaccgccaacatgtacggtttcgccatcgccaccgaggtgctgtgtggacagaaacaacagatccttgctgggttggataaaatcccggatgttgtggtttctgatgaagacggtgttggtaatggattgtacaacgcgggtaatactgacccgatgcgtatgggctcatggtccgacactcaaatgaccaacacgcttatctaccgttatcgcatctggcgcagcgaacgtgaagaagcgtcgttacaagcagccaaagaagaagcccaagcgttggagtattggattttgtcactgaagcaaaaacagcagaatgcgggcaacgatccaaaaatccagcagcagatcgaatatcacgaagagcgactgaagaaacttcgttatgatattaaacgaaaagaagaggcggctgtatgaatgcacttcgtgacgtccctttaacgttatacggtaccgggttcttcggatttccggttaacggtgtaaaacgccaggagaactacgatcgtgacgttgttagtttgtatcagcgtctggtcgacggtactcctctcgatgactggaaatatgaacgccaggttctttctaccctttatcgtttgatgtaccccatcaccgattgggtggaaatgaacagccataacccaaatctgaacttcaccagtctggagtttatccgtgatacgctacggttcattcacacgggtagacgagacacgaacgttcagattgctggtcaattgattgataactggtcagatcgtcagtcgttaagttcacaccaacgcctggaaagcagcggtaaacttatgagttatatcacgttgtcagacgaagagatggtgcgtacttggctccattgggacaatggcatccaggacatcatatgtactttgaatgcggtgtttgggcaacctatggcaccgggttttaagggcttttaagtgagctgacggttcacttaagccgcattagctaatgtgcaatttattgtaaaggaaacaaattatgccttctatttttgatcgtcttgtcgcaaatccatctaacgcacagctggttcaactggctgctgagatcgacccggatgcagcggcaaccgttgaagcagaaccggcagctgatgctgcaccagcggatgaaaccgttgtggctgaactgaccgaacgtgctgaaatcgctgaagataccgcagctgaaaccgaactggctatcgaagttcgtggtgatatcgagcaggttgatgctgttgttatcgaaattgcaaaagacgacgaaaccgcagaagccatggacgaagccatggatgaactgacggaaaccgttgttgcaaccgaaagctacctgaaagacggtggtatgtctgcacagaccgcgcaagaacacatgcgtaatctgaaacgtctgtgtggtactatcggtttcaaactgccggaaaccatgccttccttcgaaagcttcggtggttccgcttcccgctacgatgcaaccaacatgatcttcctggaagaacaaaaatggtggcagaaactgtgggcaaccatcaagaacttcctgaagacttcctgggaaaccttcgtgaagttcatggatcgcatcttcgacggcgcgaccaaactgaaagcacgtgctgctaaactgaaagaaatgatcgccaagcgtaaaggcgctgctaaaaataccaaagttaaactgggtagcggcgtttctggttacatcggtggtgatgatctggttaccggcgcgaccaaaatcgctgacaccttcgagaaagcaatgaaggctgctgacgatcgtgctgataaattcgttggtaccgttgttgctaaatctcacaccgagtacgctgataaactgaacgctccggcgattgctgacgttgctggcccggcaggttggggtttcaaagccaatgatggtaaagtaacctgggaacgctctggcgaagcaaaagaagttgaagctaccgtcctgtccctgaatcagctggctgctgcggttagcggtgttgaagcactggccgacaaactgctggcgctgaaaggcaacatcggtaagaaatcccagggcttcaaagacgctgttaaattcggtgacgatatggaagccgatctgtctaagaaaggcgaagtttccgctcaggaaaaacagcgtgttcaagctgtactgtctgcactgaaagacgcacgttcctgctacgtgaacccgcagaccggtctgatgaaatacggtgttcaggcaggtaacgctgtcctggatggcgttgctaaaatgctgaaagagtacggcggccaggcggctgagaaaccggctgacgcagcacagcagtaatcagttaataaactgacatatcccctctcccttcccttacgggttgggagagggttctatgccgctcaggtttatcttttgaatcattactggagacaacacatggtacacataccgctatttgcgacccagggcgatatcagccttgaggcgtttgaaaaagatcctattgttgctgaggcgcttgccgtggagcctaccactgaagtcatcgacgccgatggtgttgaattacgtttagcgacaatcgacgaacatgaagatgcacttgatcgtgctttccctgctgttgctgcactgcgggaaatcagttttgatgttgctccgactatcgaatcggctaactacagtgacgttgcattagttcgtaacgttcaagaatccgcatcgattgctctgggtctaccctccgaagcattgctgaccccaaccgatcgtgttgaggttggagaagctttggttgttgaagggtttaaggacaccgttgtaaaagccatgaaaaagatctgggatatcatcgttgatattgccctgactctggcagcagccttcgagaagcttacccgtcttgtttacgacgagacgcgcaattttcagaaagccgttgcagacctcgaacaaatgcctaaaggcaaatacgaggaaaataaagaagttgcgtttaaagcggagtggcggacacttttccctaaccgtaacaacgttggtggtgtagacgcgctgaaaagcaacattgataccttcaatcagatgttccttaaatcggacggttattcagttattgatgggttagggttaaacatcatcgacttccatttagataaggttgaaaaacttcccgttgattatctgactttcttgaacgctgtcaaatcgacactggaaaatcgcggttctgtggaaggtactgacgttatcactccaacggtttccggaaaacgtatccgttatgtcaacggtgcggtcttcttgaaagaattcgatgcgtcaaaagacaatatcatcgatgctgttaaacgttacctcgacttggatattgtcgttgaagatattgaatgggatagtgacccggaaacgtacgtcctaccgacacctgacgatttgcgtagcgttcgacaactgacgttcgcgaaagatctgttgatggtaacaaaacgtgggcgtgctttctctgagatcttctctcgtaataaaatccgtaccatggaacgcatccaatacgttaccatgaaacgcttcaacgagcagaattttgatgcgagctaccaaccgtacgttgagatctatcctaagctcgttaagcgcgcgattctgctttgcggtaaagagaaccgtattgaaaaccaattcgcttaccaatatcttcgtgcattgacctcatttatcaacactctcgttaaagcttataccaaaggttaaggaactaacatggcccgcatctctctttttgataacgtcaataaaaacgcattcgaactcgcactgctcagcgccgaagatcttcttgcggcaactccagcggagcaacacgatcctaacgcagaaatcgaagaggacgaagttgagttggtgattcgacgtaccgacgagacaatcgatgaatccagcgaactggctgaaattgcggtgcgtacctcagcaacgctggaagataccgcgtacatgatcgcacctacgatccctgaagcacgtgcgagcgacatcgcccttatccgtcagattgcttcgacgtcagcggctaacctggggatgtccgatgaagacatgttccaagctgacgattgtttggtggaagggcaagctattgtgctggaaggctttaaagaacgcgcagcacaagcgttatacgcagtttgggtaatcattgcgaatatcgctgagcaactgttcaaactgttccagatgttgttcaagaacctggtcgttgcatacaacaaaattgtcaagatcgcaaccgctgtgaataaaggtgagcgccatatcaaacagttggataagcccactggaaatatggtcaatatgttccctaatgctaaatcagcgaatgccgtgtttgcaagcaagcatatcgaacaactcgctgcaagcgcaagcgggacggattcactgtttaagcatgtggctgatatcaataaaaaggtcgcagacctcactgacctcacactgcttccgtctatcttagacaaatacctgctggcgatcaaatcagctctgaataaagttgtttttccagagagcggtgggaaggaattcgttattcaaggtctcgacgctgttgaaaacgaacgtgatgcgattaaagcctatacgttggtgaaaaatattcgggttgaggccgagatgacggtggccggtgagatagagaacgcaaacattttcaaagacgataacgaactgaaaggcgcattgacttcctatcttaacgtgttccgtacgatagactcctcttatttccacatggttgaagctttggccggttctgtggagcgtaccgctaaactcaacggtatgaaaatcaaaacgaagtggggtgatatgctcgacaagctgcctgaagccgatcgtgaaaccatccgtccttatgtaagcgcggtttctgaaatggcgcgcttaagtactgtattgtcaaccaagattcttcgcgcttcgatacgccaatatgcggatgctgtatttgctgcagcgaaatacttcgacgctgtaaccgaaaaagcataaccactatatcccttcctccttcccttacgggttggaggaaggtttatggcgttggtatccggttatcttttgacttctgaatcaacggttcagaaggtaaatggcggacatgatcacccgccaagattttcctacgtaggagtcccaaatggaaaacgtgttacaacaacccatgacatcgttgtttcaagggattgatgatgaacctgtagaatcgttcggtatcgctggcaatattctcgatgccagtaatattgagaatcagtttcactcaatcgacgaaacaaacacggtgatgaaagaaggtgaacaacaccttcaaacattaaataaactcaggttggatatcgtcccaaacatggctgaagttgaagaacgcgatattaacaccatcaaacatatcgcatcgaccgcagcagccggaatgggaatggatccaaaccacatcatcgagggtctggaagaggaaacttccagcgggatgagcttgaacatggaaagttttgacaagaccgcaaaagaagcaacccgagcgttatggctttacatgaacgaattataccgctacgcgatcgatatctgcaatcgttgttatcgtcgattcgttcgtcaggtgaagccgttattaaagaaagcggctgcgttgaaaactatttccgaatacgacgtcgatgaagataacgcattctgggagaactttccctacaactggcgatatcttcatccgaaaggcggtgcggtaagcagcattgctgatttacgacaaaccgcagaaaacatcgtaacgaacacaggaatcctcgcagcatggcatcgtcaactcgatccgttattaatgcagctactaaaagcaccatcagcggataacaaagaaggtatcgctgcagaaaacgaagcctgttgggagaatatcctcgaagtcatcaacgacgcgttatgcgagaagccgttaaagcctaccggaacagacgatatcgtcgttgacgcacctgttggtgcttcctaccttaaattacacaacatcgaagacgcaacaggaacacaattcagcgttgtgtgggaggctgcaccgttccaatcagcaaaagacggattccgtttcttaccgttgaacgacgttatcgacggaaccaatacaatcatcaacgcattaagtacattatggtctacgctacgacagttggaatttaaacgttgtcttgaagcaggccttgccgaccaggacgaatggattcaaccttacgagcgtttactacaacagatggacaacgacgataccaccgcatccgctatcgttcaacgtgtgggtatcgcgcgtaacgtcgtcggcttccaggcggttgcttttgcccgattcctgttaactgtctgcgacgtcatcgacggtcttaatgattatcttgacgcgcatctcgaacttgaggaaaccagcaatgctgcagacctatgacggacagattcaagcgttaagcttgttaaaaacattacctgtgccagagacagcaacgcaacgacaaattcaccagcttatttatcagcaagcaggcggtattccggcaaccggttataccacagaaagtgctgatctcctcacgatggaatcgtacaatcagcttgcgatgaaaatcatcaaagccatcatcgatgcgatctggacaacgttgcggaacatcactgcgtttatcgcccggtttatcgatcgtagtcgcgcactacagctcgaactcagcaacatccgccgtcactacacaaaagccgttggtcgtaaacccatcgcgcaaagcttcgaagcttcgtcaacgctggcaccgcacctacggtatgggaacagttttggattcgacttcacaactgggaatacgttatacaaacagaatttggcaatcgctgaatatctcttgtcttcgtcgttccgtgatgatttcaagcagttcgctaatacgttagatagagcgctcgacattatcttaaaacagacggataccgcattaatcgatgtgattaaccgtgacgcgtatacgttattgcataaagtctacagcacgctgaacgaatcgagactcgtcaatgtaacgttactgggtaaccgtacgctacgactcgatcaggttaccgcttcaggttctggttcaattcaacagtccctcaccattcaatccgcacggtttgaagtccaggatgtaccgtcagttgaacgggatatggtggttacaatgccaacattagaacaagttggtgtgctactcgagtcggtaaatacgggtgttgatttactggttagttaccatcgtaaaaagtacgccaacgagttactcgaaatcgcagggaatctacaagcaaaacttaacgacgtttatcgtcaacaaggtcagttgtcagttactactgcttctgatgatgctatggtagccctttctcgataccttacagcgtataccgcgtggatcaaggtgccgcttgtgggctatgccgagttctttacgaattcaacagcggctatgcttgatgtctctcgcgaggcgctgaaatattacttttaagaggaataacgctttatgaaaaaatcgttagctgatctgatgcgtaagtcgcatcttaacctggaaagcggcgatacacctatcgaagtcaaagcaacgctttctactgataaagaagagcaagtgatcgcattacctacagcggcacggccagacagcatcgaagcgacgatcgaatcagatacgctcgaggaaggggctaccgttgatgacgctgttcgtgtgattcgtagcacggatgagaacggtgaggatgtcgtacgtgctgttattgtgacccgtcctattgatggtagtttacgaattcgtttcacaccgagcaacggtggcgtaaccatggaagacggtaacgatgttcaaccgttcgttctgatcgcggtaccgaccgcacctggcgaagagccgaagaacccgtatccggcaaacgcaccgaccgaaacaccggcaccgaaagtgaccaacgacccgaccgttaacgctgaccgcgacaacctgaagaacaagattcaggatgcggctaacgccatcgatccaaccaatccggcgcaaatcgaacaggcagcgcaacctgcagaaaccaccgaaggtgttaaaggtaatgtcgtcgaaccggaaaaagcagaacctgttgctgaaacagcggctgcggcaaccgaggtgacgccagaaaccaaaacaacggaagaacccatcaaagtcaccgtgattaaacgtgtcgtggagaaagtagaaaaggttgaagataccgtcgctgacgaacaacctgttgtcgacgctaatgatggtaataccggcgagcagaaagccgaagcagttgctcaggaaacagaactgcaaggtgatgttgatgtcgataacactgacgggtcgtccacggaggacaacaccaccgaacctgcgtccgaagaacctgctaacaccgacgctgacgctggtgccaccgacgacacaaccaccaagggtgatgaaaacaccaaaggtgacgatgatgaagacgacgaaaacgaagaagatgaagatctgaaacaagagtcgttcgaaattcatcaagagctggaagcccgtggtgtattagatgttcctgttgttgaacagcgtgcatctgttattctcggtgagggtgaaacagatgtaaccgtcattgaaacagaacaaccgtacattcctggcaccatggtggtacgtcgtcttgatggggataagagtgttattgttcgccgtactcgttacgctgaacgctttaacgctgatggtcagggtgaagcgatcgccattgtcgaccctaccctgcaaggcgaactgaaaatggaattccgtccggctgaaggtccgatggaaagcttcgagattcgtcctgaaatcaaagacgaatacatcatggaatcgtacaaacagcttgatgtcgcactgaacagcgatctcaatctggaagacggggaaaagcagccgggtcgctttaaacagattctgaaatcggtttacgaagcggtcgcgaagttcttaaaagccctcgtggcgcgtttgaaaaatctctttggtgttaataagaaaaaaatcgaagagaaggccgacaagctgaccaaagaacaacgcacagcaccagtgatgaaactgcttcctccgccgagcgacaccaagaaggttgacgttgagtggaataaactggatacgctgctcgcaaacgactcgaaatctgtcgataagatcgtaaatgcggttaaagacagtaaacgtattgcggacgcgtcgaagaaatatttcgatgagttaaagaacagcaaggaaggcgagcaagttcagcatccagctgaaatgaaagcagctcttggaatggcgggcgtgaaagcgttcggatattctatcgacgatgtgttaaacggcattcgtgagttccgtgacgaacttagcgccatgaaacaacaggatgatgctgtgccgtccaacgttagcgttgaaatgctgatcggtgcggcaacgaaactgtttgacgaagacctcctgaaagcagttactcaacttcaggagacggctgagcagttactccgcgatctggacaaagtggaaaacgaatcgggcgcacgctacgtcacgcagcgcacacgtaccctgatgaactttgcaacgaccgcatgcaccgtttacggattcgctgcaaaagaactcggcgatgttaccgttcgtatactcaccgctgtcgcagcggctgataacggcgatctcaaacaggaagaataccaggatgttgctggtgaaaacgatcctgttgtcaccatcgaaacactggaaggcgatgccggtacacgtgttgttgccgaggcggaaatcgttgataatcctgcggtggtggaattcgttgagcgtgctgaagaagcgcagcgaaatctggctatcggtcgccacgcggtgagcgcggtggaaggtattctggtagcggcacgcgagatcggtcccgataacttccagggtaacgtcgaagctaccgaaattgcgatggaaggattcatggataccgttaagagcgcggttaaccgtatcggtaactggattgaaaccaaccatcgttactataccgccgctacggctccatgggataagctgttcgccgaaacacagcaagcgctggccaaagcgcgtcgcggtaacccagcagcagaacggattattctgaaacgtttcatccgtcatcttaccatcggtggtgaacctgttaccgatgtgaagaagctcatcgctgcgttgggtgaaatcaaaatgcttggtaacatgacgcgtgaattaatcgttgcgatcgatcgtgagctcagcgacgtgcggaagagcaaccagtccgaaacatccgctggatcggttgttggtctgaagcgtattcctattcagaaatgggataagctcatggtcgctaccgtacaaccgtggaaagacagcgatcgtaaaggtgttgggtccaaagcgtatcttggtgaaacgcacatcgtgaaggtgagcgcgacttatgcgacaacgcgtaacaacccgaacgaggaagcagcgaaactgatgcagtggatctacaccggtatcaatcgccagtttacggtttctgacgacctcaccagtgaggaattaccggtagctactatcagcgaactggaggcagtgctgcgtgcggctcgtgaagcacatgaagcttggcttattgctgacaacgccatgcagaccctgcgttcaatcgataaattcctggatagcgaactcaacgttgagaacgatgttaataatgtcgttaactacggtattgttctcggcctggaagattggttgttccatccggcattgacgttatggcaacagttcaataaaccgatgcaagcggtgcttttcctcatcaaagcccattgcggtgcctacaagtaatccgtacgcataaacagcccgcccttcggggtgggctttatgctgtcgaccatcatgtgatatcttatctttcaaacaggaatctgcgatgacacgtgaagcaaaatttctttcactcgcacttaacggtgcgcagcaacagacatgcttggtagcggcgtgcccgcgacattcagtacccggtatgtatatttgccgtattaacccacataccgcacacgaaaccgtcgtgcagattcctgttgcggcactaccggaaggtaccatcaaaccaatcatccaaggattgccgttagaagcgctatacgctgttttaaacaacgaaatagaaacattaatggaaacgtccaatgaaacagataaaacgcgtctagggctcgttaaagagcttctacagagcagtctgattcattataccggatatcgacaacaaggaggtgaggaaattagcgaggacgacatcgatgcctaaacttgatcgaaaaatcaatgacgtatacgcgacggtaacacgtccggttgcaatcgcggtgttacggcagatcagcgagctttgcgggtgggattataatcgggagaacattctttttcgaggggaagcacttcacgctaaaatgagcgctgcgaacgagcaaccaccgcaagttgttgatcaggatgtaaaggggcctgccgacgggtttatccaaattgagcttaatattgtccccgaagaacaggcctctatgtacgataccgtttacaaacgaaacagtcttcccgtatttgaagaccgtaaccttggcgtatcgttagtacctgtttacagtacgatggttgcaaccatgcagatcaccaaacggttcgaagatcaggtcactgccgaacgttggtggtacgacatgaaacgtttgctgacaagtcagcatgtcgccgcctttcttagcgctgaatacagctatgcgatcccaacacagtttctcatgttgttaaaagttatccacacacaccgagaagcaatagcgggttacggggataagttcagcgaataccttagagacgggttcgacaaccgcgcaaccaccatgacgacagttgcaggtgacggtaagagcgttaaattggttatcagggaaatgcaagaagagatctctggtcaatttgatttcaccgacgctccgaaacccgagaagaatgagaacagttcttcgtacaacgcaaccttctcttaccgttacacatacgacacgccaacacacatcgtagcgcggtatcctgttcaagtacaccaacagatactccccgaagagtacctttacaaaccgagcctctcggtgcgcgataaatcccgtgcgcgtcgtggtggtatggtggtgcagtatcaggacattcttcgtgattcgttcttgccggaacagggtgcatcgattcaagcgtatcggtatcctgatttggatgaatggttgcctccatcgagcgtggaaaccgagcttccatcaagcacgcttttcaccgcgctgcttgccatcgatcctgaacaacctaacctgttggtgacgttggactcgttagccgaagaaggtgaattccatcccgatcttgttcggtggttccgtgagtacccagaatggtcaaaatgccattatcaatctccttttttccttgaggtttggaagggcaaataccgctacgcaagagacgcgtggacattaaccgacgttggtgatcttgaagcgaaagatccgttagacttacggagtgattaccacgttcgtctggcgatactgttagatttaagtcagttacaggttgaaacacttgaagcgttgtgttgttatcccaatctggtggatgagctgtttgcagtattaggtctagataaaaagtactggcctaagaagaacagtcgggggtgctatacgctaatcgggcttatcgaagccatcaaacgtatcccaacaacagcttcgtggttcaaacatcgtagtttattcgtaccgagaattcttgtcggtaccatcgtaggagtgaaacgctatggcgctcgctaagaagcccgcgaaacccaccatcaacccccaacaacccgcgaaggctcgcgacgatgtttatcgttctgcggtggtggatgagcaatacaatagtcaaatcgggttagtgaattacgcatccggttattccgtagaatgtgattattacgaacagattctcggtcgcgatgatgaacaaagcagttttcaagctaaccgagacatcgctgaacagcagtaccgtcgcatcagacattaccctatcaagttaatgtcgtcattgacgccgtcgtacgacaacgggaccgcacgttttcaatccgagggtacgtgtatacttccggcggtatcggttcctcttttaggtaacatgctgttaatctccggtctcgatcatcgtatcgcggtgtacacgatcacccgaatcacgccgaagaacattagcttagcaccggcttacgaatgcgatatttccttccagcgtattcttgacgaaaaacagcttatcgaactggaagcgaaaatcgttgaggatacgctgtacgaccaagaccagttaaagcacggaaaacatcccgtaatggcaacggagaaatacaatcgtaagtatgattatctccgtcgtgcgctgggactttgtcacgcgtactaccatgaattctacagccgtgaattaaacacattacttgttcctggtcaggatgcggcaacctacgatccctggtgtgttaacgcgtttacgaaattatggtcgtcgcttgaaggaaaaccttcatggaacttcggacgtcttaacgtagacgacagccaggaagcgaatgcgatttctgtctttgaatgggtaatggacggacgtcgggaagacgaggcgcggttgacggtgaaattcacactgttgtcaacaaagcgtttctatcagtacccggctgcaggtgggattcgttttagtggtgcgcggttctgtatgtggcctgcgaccacgtcgctcggtgaagacgtaggtaaagagttggctgtacctgaaaacacaccaccgacaaatccgttggtgaccaaccttacatcgatggagtatgacggcgttccgttgtttccatctgtagcggacgatccgtactatgttttcacagaggctttctatcgcaatcaagccccaatgacaatcattgagagtatggtacgtgatatggtcgatgagaaagcaatcagtcatccagcactgaaacagatggttgacgcattaccgttgctttctccgctggatcgttattatttcacaccgttcgttattatgctgttacgagcaggagctattgaaccatgagtctacaacacgttaaagataccccaaccaaacgtctatttgaacgtaaattcgaattctggattccccgtaaattcatggtggacaattacaccaatgaggtcagcggcgtctactcttcaggggttgcagaaatcgacgatatggccatgaacgaagaggtgcccgcacagcttaccgtaccgcaggctgctgaaaaacattctcgtggtgttcctatgcgtattgcaaatcctgacgtgaacgccatgaagatgttcatgcttcttctggaacatacggaatacgttaaatacaatctcgaaaacgaccctaacgcgcgcgtaccgtctctcgaagccagccgtatcctcgaagagttcatgggtggtctgtggaacgttgcacgcggtcgcattaaagacccaaccgaaatgagcggattatcttcacgtttacgtgaaatcggtcagcgccgtaaaatcggcatcaaccgcgcacgtcgtggtggtctcaatgcaggcccaaccgttgaagagcaactgcaagcggttcgtcacagcgaattccgtggtacgaagatcgaagaattcatcattcaacaacagcaacggggtcgttaaacatggattacaaacagacgccgttaggacggtatatcggtacatttgcgcaggaagcagttgctgttgcgtataaagtcaccgcggaattaatcacgccgtcaatgacggtgtctgttcctttagtgactcaagtccacacgtatcgagactatgaacgtaacgctggagatgaactctatatctctgtaaagttcccgcccggcagttacggaaaatacattctaccgtaccaacaacaacttaaaatgcgcatcatcgtgcaggcgtacagcctgatgcgcggacaacgccaaaccgtagacgatgccgcacaagcttacgtctaccgagcggtttgtttaacaaccgtagacagtcgtatgtccgctaccgacgaacgtaccgcaaccgattcttcgaagaaagactacgaacaaatggtcgatcttcaatttcaactgttcgatcctgttcttgaaagcttcatgcaatcagaaaccggtgagaactatactgggtcgaaagtgctggatgtactgcgacttgaattcagcaagatactttctgcggttgaagctgacaccggattcaaaatgcagggtgtggatattgttgcaccgaataacgacaacccattcaagttgcttattcttccacacggtaccaatgcgatggatctcgtagataaaatacagaaccaggtcggtatttattcagctgacgtcggttgttattatcaatccccgtatctgtatatctaccccttatacgacgaaacccgtttctctgacggtcggcgcacggcgatcttttacaactatcctgccgatatgtttccgggcatggacaagacctggatcaatcgtgacaaatacgtggaaattgcgtgtacgagaggggcgtcggtaagcgacatcaataacgcggcttcgttgttaggtaatgcgggtgggcgttttgtttcggcaagtcagatgagtcagggaatgacattatcaaaagggggtgatacgatcatcagtcgtaccgtaaacgttagcgagtacgtaactgaagaacgtagcgataacgtgaaagtggcgaaagggatgggacgcgtaaccgataaccgatggcgtgaattaagcaatactgccggattacgcggtagaacgatgcagttggtgtgggagtacgcaaacatggatttgttgtatcctggcatgcccgctaaagttgtgtggatgcaggataacaatctctgcgaagcatacggggttatcatgcgtaccgattgcgctgttacaatggcaggttcttctgtgcgtgaaccgcagtggacatgccatggtacagtcacgttatggattgcaccagaaaaagacaatactgttcgtccaaccgtttaatattccctctcccttcccttacgggttgggagagggtcatatactgtctaacccagtttatttcgcgactatattacctaggtgataacaacggttactgttatcactgtaaatttctcttaatagccgaggatacaaacatgacagatatttacatcaaactggctgacgacgctcttgatacattaatggctgactaccaggtcccagaacaaacggatagtttcaacgaaattgttgaggcggacgaaggacgacattggatattttctcctgtggaaaatcaatcgcgccttgggtatcgtaccgtagaaacatttaaggtcgctcgaatctttcacgctgcaaaaggcaacgcgtatttcgtttacgtaactcaggatcattccgatgaaccgggtcgcctgataaaactcgatgcgtacgaagctgaacgtaagctcgaatacgctctcaacgagattcgtccgcgaatcacaaagaaacgtcgtagcaccggtattctccgcgatctaccaacgatttatcttgaagtcgttgagcttcttagtcgtcgagatacttcggaacctgtcgaaacgaacaagccgatctatattcatcctgaatgccataccacgtacgatcgttacttaacgataacaggtggtgtagcagcgccatcaccagtggatatcggtgagtggagaatgattcgtgagatctatcccgacggccgtatcgtgacgttttgcggtcgcacctgtctaccttgcgatgcgttgaatgaaaaagtcctttccgcttatttctcaacgctaacaaattcccgacagttctatgcgctcgtcgtcgattcccagaaagaatccatagccggtaacgcgggatcgtactccggctatcctcaccatttctacgccgatcctgagtaacccaatattggtagggctcctttgtttagggccctaccagcatcacaaaaccgcaatcatccttatcgtaatcaaggagctcaacatgaccactatttatcgtgaattatccgctgaacaacaggcacatttcctcgcaatgaaacaacgtttggtggacaaaacagaacttttaaacaagacgaccgatgagtgcatctgggtgttatctgacgacgccaacgacagcctatgctccgtatatatcgaatcaatcgttttcttcaacgcactgcacaacgacaataacgcaatcttctttctcaaagatcccagcgttcctggggggatctcttatcttacaaaacctcgcgaacaagcatgcgcgagtatctttggattactcgaaaacctgagaatcaggtataacggaatgctgacaaccgttcctgatctttacgtcaaagcaatcaagaagtactatacgaaagaacctgtaatcgacttaaagaaagaatttgacaatttcaaaaccgacacaccatcgctctcgatagagaaatgcgacgataccgatagaacggaaatgacaggacctatctatcgtcatccttgttgttctgaagggttcgatacttaccttaccgttacaaccggatacggcaatacgccgcccaaagacgttcttatcggaacatggtgcgtcgttcgtgaagtttacccagacggtacaattattaccgccgatggtgatagactcgctccagcgataaacacctacgccgacaccttcaaaaacgaaggaacgttcgaccgtcaaaatttggtttactacgtactcgcggttaattcaaatcgtccttctcaacaaggtttctcatcaacaaggcaaaatgcgccatacggctatcatccacacaacagcatgttcaaccaatctaacccgtactacgatacgattcaacgagtacaacaacatgtcagtccttgtaactcgaagactaagtaaaccttaacaaacttaaatcagtctatgcattgattcttctatccgcaatccacctaacatagaaaggtaaaaacgatgttcaatccagaaatcatgattctcgatccttggtacctcaacaaacttccaggaatcaaaatgccaggcgatcctcacgcattcgatttgatggtcgttgccgaagttaccagcaatacggttaacactatcgacgatgatgaggttcctgttgaagaggtgttctctgttacgacgacattactggaaagtcgagagttgaccgaaaacggcagcgccgatgaaatcattcctatcgatggtgagatggagatcatgttaacgcaggtcgagttgcaacatcgtgtcgcaccaacaaaagacacgccgtatgacaatgaacctgcagaacaacctgatgaaaacggtcgagtgaaacttgctgacatcgacgacgatgctctcgaagagatcgacgaaaacgaagaaacgaacttctaccaagctgaagcgaaagaagcgtttgataaagcggttcagcatgatcgacgtatcaccgagaagatgatccagcaacaacttatcggtaaacgtcttaagctcgaattcgcaagcggggtgcttactacctggtcactcatcgtctaaaaccgaaacaacgttttcatttcccaatcacatacccaacaatctaaatccaattaagaggacaacatttatgtttaatattcttagtgtaccgcgttcccctgtgagttcttacttcggtattatgaccagtaaagaacacaatgtggaatatactgttatcgctaaagatccatcaccgatcaacgtaacgtttgctgaaggtactaccgaactcgttccgttaaacggcgaattcagtaaacctgttaacggcgtctatgaactcatcactcgcgatccgaataacaacgcgacataccgtgtggtgtgtgcgttcaacaataacaaactggttatcgttgcggatagccgagggttatcgtggatggctgaggaaggcacacatcgttactacgaagagtgcttacgaaccgcaggcatctacgatctggtaatggacgcccgtgctaaaaacgaccgtatgttttaaattatcatgattactcgagaaatcatttacgacgctattatcgaatgccgtcatcgcgtcatgcgtggaacggtgtataactaccacttaaacaacattatcagtgaatgtacggcggtgatgactagcgcgctgggtaaacctagcgctatcgcactttatccaaacatcactgaacaggagcaaatcaatatcgaaaaccaacgtcgagtgaatcgccaatacgatgtaacagccatgcacgcatggcttatcgttgcagcgaaactcaacacgcttctcaccgagaacggctggaaattttcacctaatgaattcatgacaataagttaatcaaagcggtcataacccctcctccttcccttacgggttggaggagggaaccgcacaatcttttttttgcgtttaaaattctaaatcaaattgtaattcattactcggtgctgcgttttcatcgaacttgttccacggacctttacctccctcggagacaggttgtccgccaaccttgcggcaatacactgctttcttaccgtaatcatcaggaagcatcccgatggtttggaatggcattgcgaagtgtttgtcttcaggtttcgttgaaccgttatccggttgacggtctttccctaatgcaaagacttgccagctttgacgtttgcccggttccttaacgatatcaacaatcacttcaaggtcaatctcacggtcaatccctttacaaccatcccagtaacttaaacctgcgacttggtcaacaaactcttcatcgttgccatcacgtgcacgcatcttcgcatcggatgacagctggtgtacggtcatgcctaaaatacgtttaacactgcagaggttacggactttgttgaagagttcttggagccatgcgccggtcggtccatttctatccagcccttccgatgagaacattttcagatagtcaatgaacaacgccatgacttcataacccatgcgttcgaaatggtcgatgagattagcgagttgtttataactcatcccatcaacacgacgcatacaaacagagaaacccgcatcgttgaacaccttcaacacataacgtgatgcctcgcgagggtcaatcttacgaatatcgacatattcgcctgtttcctgttctcgcatgttcttgtatatctgaagcgtgttttcttccacttcgttttctgtcgacaaatgaatcagtaatgctttctttgctcgctccgggaaaaagaaatggggtttgttgtacaatgccagatgtgtgaacagttttaacaacacgcctgacttgttccggtgctgcattgcaccaatcagtcctaaggtaccgcgacgtaaaacaccgaccgaccccaacattttattaaagccttgccagccggttacaaatccaccttcaggactgttacgttccatcgctttgacgaacatacgttcgactttctcgatatcgtcttcgctgtcagcgataaagccgtcaatcatacacgacatctcttcgggattttcggtatccatttcgatactgtctagcgataatttcagattcgccattgcatcgaaaaattctttatccccaagtcgcccgttactgatatccatgtacgtgtttctaaaggtttcgaaaacacgacgacgggtaatcagattacgtaattcgttgtaatagagtgaacagaccttactgatatgagcgtcgtcttcgatatcgtacagtccgtcggcaagaatctcgtaaagattgctttgttcaaggcaatccaaacgtatcctttgtaacaactgttgtttatcgaaaggttccgataatggttgttccaacatccaatgaatggtattcatcaggttgttgaaaacctctctatctacgtctgtagcgagatggtttttcgggggttcgactttatctaagacggatttaacatgttcgatcgtactgggatcgggatggttcaattgtgcattacgaaacagtaacgtaataatcttaatggctatctgttttgggtccatcgactcaatcctttcgatacttgcaaagaggtaatcataatgaaggaactccgatatctcgtcgttccgaattgggtagaacacgcgattattcgaaatgcgcgtgatgacttacaggtgttattagaccctaaaagtcttttcggcatactatcgcccaatgatgtaggtttttatttcgcagcccagaacgtgcctttcttcatcacgaaagaacacgaacaaacgaaccctgcggttcatcttaacaacctgcttggtggtatgtttgcgtatcactatgacgaaacaggtttgccgccagagaagaatgttgatgtgctgtgtgagtacatcaatcgttatgacaatggttattaccatttactgacgagctatccgcgtgatattgaacgtcgtttggcggatccaacttacagcccagacaaacgtccgttgagtgttcgggtgcgttatgttaatgaggatgtgatcgcgattgttgtcgattgtcttcctttattggcagaagagttattgagcgatcgtattgctgataactacagcgccgttattgaacacctgcgaattaatatgagtcttgcggaagttgcgcaattgccgctgttccgttcatattgcaccaatcgttccatccattatcgcctgcgtcgtttatgacgtagggaaaagttatgcggcatttttagtgttgtatcacgacctcaataacggtaagtgtttactgatactatagtggcgcatgcacgcgtgtacgctatggtctatcgaccgacttatataagttaattctgtaaaggatactttcaatgaatgataaaacccttcttagccaacaggtcgcggccactcgccagttcctgaccgctaatggtagcaaaccagcagacaaaggtctggagaacaccttcctgtctatggaatctgcttctaaggttgatttcaaatccatggacaaactggttaacgaaatggatgttaagagcttcagcagcgatatccgtaaagccgaagaaccggttctgtccatgctgggcttcgaaaccaccactccggaagagaagcagcgtattgaagaacagctgttcaccatgaacgcacagcaggctcgtgcagcagcactgatcatgctggctcatggtaacccggtagaatatgctaaacaagcacgttccatgaacatcagcaccactccgtctggccgtgaagttgacagctctaacttcgtcatgatggctgctgattcctgcggttgcgaatctgaagaactggttcagctgtcctacgaccagaaagaactgcgtgacatgatgccgtactccgttgtgttcaacgtgaaggcttctcgtctgagccgcatgggtaacgaactgtacaacaccatcgttctggctccgaaccagatcggttacgacgtatctttccgtcgtccgctggtgttcaaccaccttcgtcgtaacgctgacggtactccggctgattgggtacgtcgtccgctgctggatgcgttcatgtacaacgacgttctgtccaacgacgtgaccgatctgcatccgatctatcgtgctgacgatgctaacgcacagtacttcgttgacaaagctatcgttgctccgcgcgacatcgaaattaaaggcgtaacttacaaaacgtcttacctggctgttgataaactgatcgacatgatcggtattgctgaagacgatagcatcctggctaacggttacagcgacaacaccgacgcgctggacgcccagatcacgctgaccaaaatcctggtggaaatcaaatctaccaagcacagcaaaacctcttacgtaccgttcgacgtatctggtctgatcaccaacggtttccagaaatccctggaaggcgacttccgcaaaatgaccctggcgttcgacacccactccatcttcgttgatgagaacaccaaagacgttaaaggcgcgaaagctgaagcgctgcaggacatcatcgatgcgaaatctgctgctcagctggcgatcgaagtttacggttcttccaacgtagagaaagccggtctgcgtgttaacggcgctaacgctgaactgtatcgcctggttgatcaggacaacatcgaacaaccgcgtaagagcgaagagttcaaacaactggctgaagacctgagcttcaaactggttggttacgaactgcgtatccgccgtaacaacagcaaccgtcgtgagcgcggtaagcaccttgacttcaacatgaagcaagaacgttacgcaatcggcctgctggctccgttctccattcctcgtccgctggattgggaagaaaacgctgctgacctggacgttctgatccaagctgctaacgcacgtttcgacaacctgatggttgagaaactgttcagctacaaagacgcactgaaagcggttgcgacctctcgcttccgtcagttcggtgacatccagatcgaaggtttcggtcgttacctgatccgtccgtggttcgaagaaatcaatctggacctggagaaatctgttcagggtaccaccactgcagaacgtcgtgctgaagtgtctgctgcgatcatgaacgtgattcgtgagatggcataccgcatgtactccgagtctggttatcagccagctctgcagctgctgtcttccaacgctgatgagaaaccgcgttgcgtagtagcaactgacaactacatcccgcagttcctgcagaccgatggtgatttccgtaccgttggtgtaagcttcaacttcgtagttgtagataacccgaacgtcatgctgcgcgataagatcttcgtgaccctgtctcgtggtatccagggttctccggatccgctgaccttcggtatgttcctgtatgtaccggaactggtatctgttgctcaggttacccgtaacggtcaggtttctaaagaaaccatggttcagccgcgctgccgcttcgttaacaactgcccgctgctgggtctgattaacgttgtgaacctgcgtaaggtctacactgaaaacatcaagctgcctgttcagactaactgaactaccgtagctgcttcgttggatgatattcttgacgacaacgttgcggatggtttcattgcaccggacattcatccggcaccgtgatacataagtcagcctccctcagcccgcaagggttgggggaggtttctatgccgtttattgttgcgaatagaaaaaatttgacgcttacattacctaggtgacagacgcctgcgatgaataaggcatagacaacacgtaaggtcgttctcgcgctaggaacgatgctgaaaccgtcggctgtcggctcgataagaacaagaaaagggaaatgtattatgcgtgatagttttcaatctgatggaggttgacgatgccctccatgccaatatgtgataccgcgttcgaaccgtgggatggtacgcacgcttatcgcattgacggttatgctgaaccgttatatgacctggaattaggatgggcatgtattaatgaatctggccataccgtgttggttatcacctccgacaatatgttccagtacattcctggtagggttgaggacggcaatacattcaggatcgtacgacgttcaaaatttcgtagtcctgtaatagttgacagccatgacgtatctaatgcgaatggtgcattcagaaacttcgtctacgcgggtagacgtcgggatatactccgtgttaaaaacggtacaggttacgcgataaggaaaccgcatatccgtcgtattgttaacgctgagaaaatgccgcgtctattagaccagcaagactggtacgatacgctggatgagatatgtcaaattgacctcaacacgctgaactttaatcaacccgcttatgtcgcgcaaatcaacgtggcaatcgtaaaagttaaaggagaatacaaaagcgcagaccacgttacgaaagggattgatcacccctacatcgcaacgtgcgcgcggagcttgacgggaaaaacagagggtttccggattctcggaacgcaactcactatccattggacgccgcccgactttcataatccgtatagcttatgggttaacgtgttggggaaagcgttcgaaataaaaccaacgaatggagcaggcgcgccaggtatgttggttaccttcgggaataatgactccatcttcgtaccggtcgaagatttggaaaaagagatgtggaagtacaatgtttttccgacacgtgaatcggcattgcattggcgcgaccccatccaaaaagaagcctacaaaaatgatttcgaccaacgtagctacgaacgtaaggcatcagaagaaacccttaaaggggtgatggctgaaatgcgacgtatggcggatgaacacaaggcagttatcgcacagatgcatgaggcgcatcgcgccgacgcaaagctgcgtgatgaacaacataaagccgaactcgatcagcttaaagacgaacaaaaacgtaggatggaacaacaccaagccgaaatgaagcgtcaagatgatctacgtagacaaatacacgaagattatcaagctgatttaaaacgtcgtgacgacgaggctaaacgcaaacatgaagaattcgtcgctgaacttcgtcgtcgagacgaagaatccaaacgtaagcacgacgagtttgctgctgagatacgtcgacgtgatgaagaggcaaaaagacaacgtgaagcggaagaagcgcgacgtcaacgtaacgtcgatgtttggaaagccgctgcgagcataaccgcggccgttgtcggtataggtatgacctttttcaagattcttgagaaagtgtcatcgaaaaagtaactttaatctgcttaagcaactttctgaaaggagtgtgtgatggatcctagattctgcaaagctgtcgctgggcttgcaccgaagatgaacgagaagatagcacgcaacatcgtcgtcgataagatgcaagatgttgagtcctatgttgatcgtctttggcggaacagcaaagatagtttacctaaggatctggtgtatcatggcctgcgtcgctgtatggcccgcgaacagttccactacttaagcggaggaaagaaaaccaaagggaaggatagcggtaagctgaccttcgaccttgcgccatccgatgtgtttatggtgatgctagaattccgctggtacggagcgatggaatcaggtgaccgtcgtgaacccggaaaggactactgcattatccgacatcctctcctattacccgcggtaggtcagggtggtaaaatgcgtctacgtggtgcgaacttcattctcagtgcagtgctcgctgacccggtaatcagttacacgaaagacatggcgttcatcatgcttccgcgtgacaaaatcacggttaaacgtacaccgtatcagttcctgagcaatgatacaccgaccggtatcgattatcgtcattacctgtcattaccctggtcacaaatctatcatcttaccaaacaaagtaaagtgaacggtgacaacatcaaccacaccagcgtaaccacactgggtcactatctctttgcgaagtacggggtgggtgagtgtttccgacgttttgcaggtgtcgaagccgtaaccggacggaaccttgctgaacgtgattttccgcgtgaccaatgggtaatctatcgcaccatgggggttattcctaaaggttttagtatcagcaaaagcggtaaaagccgtagcgctagcgctgtacgttacaaacatcctgatattcaaattgcagtaagacgtggaggcacggaacgtattgttcttggccttgtcggtgcattcttgtatctcatcgaccgttattacgatcgttttccggaagactatccggttgaagagttcgcgaatgcgccagaccattggcgtacattactcggtttgattatctttaataacaacaacgcggatgcgcgtttgttgcgtgatgtaaaccaccacatcgacagtctcgatctttacgttgatgaaattcaacagaagaagttcaaacaggaaaatattccttgcgacgacttctacgaatttatggcgtatctgattgacaatgtcactatcgaaatgagtcgtgttgataccacgacgatgttcggtaaggaattgatggtgttggaatatgtcatggaggatgtgcgtaagagcatctttaaactggggttccatcttaaaaccacagaacgtggtaaacgacagaacaaccgtaaagagatgaccaatcgtgatgtacagaaggcgttgcgaaatcaagttgcaacggaagcgattctcaatatccagagcaatcgtgataaacgtgagaaagtggcaacatcgattcagtcaccgggtgattgcatgctgttcaaagtgagcacgcatgttgttctccagagccaaaacgcaggcggtgctgcattggctgacgagagtcgtttggttagtggttccatcccgttctgtgcaagctatctgaatcttccacactccgaaccaaccggacgtcagaagttcagtatgtacgcacctatcgatgagcgcggtcggttaatcattaccccacaaattgcaaatgacgttgcagcaaccaatgcaggcttgaagaaagacgtcggtcgattcgatgaagaaattgtagaaattaacgatcacgacataatcgattgacacataaccgaataaataaaaaggatcgtaagaaatgtataatggcagtaacaacatgtatcaacaaatgggttatagcgaaaacccttatacgagcacggttaattatgcggctgaacaggttcgtcagcaacagtatcagcaatctccgtacggcgcatacccgaataacgcctatcaaccaccacaataccaacaaccctcatatcagcagaactataacttcatcacccaagaagcgacgatcgtcaaaatccgtcaagccatctttaatgtcctgaaagacttcgctcagcaagacaaaatacaaaccgagttcgtcgcacgttataccaataacgatatgatgatggaatcgcttgttgaagactgttgttggaacgtattctcttacatcaacccgatgccgcagaacgcgtccgacgaccagatcgtctctgctgctgtgagcacagttgcgctgtatcaccttgtaacgtggctctttgaaccgaatcagtacccggaatattatcgcgcgattgaattatcacgcattaacccggaagccgcgaataagtacacgcagctgaataaaagcggaagcctagcgcaaatcgctcagaagtcacgtggtttgaagcagcaggtgatgcagatggggatgacttatcgtgggccgcaagcaagcgcgatggttagcaacgggtatggtcaaccacaacagcctgcgtacgctatgtatggtggaacctatccgcaaccgcaataccaacctagtccggcagttatgcgcggcatggctccaacaacaccaggatacggtgcacaacctcggccgacggttgtccaaccacaagcgccatcgtacattgattcgaaggattgtgcgttcaaccgtttgtatgatgttggtgatgacgatcctatcgttgatgaggtgcctgctactacagcgccgcgttacgaggcaccacaaccacggatttactcgacaaatcctgaaggagatattggtggtatcaacgatatctttgcagcggctgaacagtttgctgaacagtacgaagagccagaatggcatgttaaggctgggcagcagaaacccgttcaacctgaacctgcgcaggtgaaaccggaacccgttcgtacggctcgttctgctacggtaacaaagaccgttaatccaattgatgcgaccgaagatgctaagcgttacggtcgtgttgttcaacatgaagaatttatgcagatgcgtctgaaagccaaagactttgcacctaatagtcgttggccgacgttgtatgacttcaggcacttcgctcgtcgagcacgtatcgacgaaaacggaattcttcatgaaaccattgttgacattacatccctcacggaggaagaagtggaatacatcgaacttgaatcagatccaaccgctcgtcgtatggcagagcaggaaatggcaaaactggatcgtatcgcgcaagcagaagttgttcgtgttagtcttaacaaaccggttcaacgtgagccaatcgttgtcggtgagcagcgcgaaatgaaactgtttaccgtcaccgacgcaatcgctgcgtcaagcgttgaggatgctgaaaccaaagcttcagtggcaatcattcagcagaccaacaccgacgtcaaccaaaacgacgcattagcattccttgccaccatcaattcctatctgggaacctataccgacaaagagctggatgcaatccatgaattcctggatgcgttgtctattgataaaggtcgtagcgacgatatcaaagcttatcgtcagatcatgcaacagtatcgagatgttattcctctgcgtatctggcatttcctgaacgatagcatgaccaaagacgtcaataagctgatcaaacgtatcgtaccgaagaacttctctgaaaccaccatctctagcttcgttgatgatatcggagaactgtccggttggctgattcacgatcttaaaatggaccagaagttcattgaagatgaattctccaattgctactatacctgggtcaacatgctgaagtgtctctactgcaatcgtgacggcgaaggtcagtggaacattcgtctttccatggcagaactgtacaacatgcatgactacctgaaagccgctcacgaaaaatccgcagcgaatcgtgaacgtcatctggttgccatgagtgagtatcgtgcagaactggagaaagatggctctctggacgccgatgaaatcgaacgtcgtttggcggatgcggctgtcgaggatatgcgtgttaatccagacatcgttaccgacgaagatagcaacgatgcttactggtttaatcatagcgtgttcgcgatgcgtccgcatgttgttgttcgcgtaccgaccaacgccaagattctgaagctgaaccaaagcggttacacccacgcatcggctgcaaccaacccaagcattgctcgtatgctggatcaggtgttcaagaccttcgaaaccaaagtaaaaggtctgcaatctgttactgtaattctgagcgatgatactcgtctgaaagcagtacgtacggtaaacggtattaccgcttccgagtatctgctggaacgtgaagagcagtaattaacttatcgtccgacggtgggtattgtatttgcaataccctagttgataaggaaaccgtatgagtcaatataaactcattaccgtctctgtggatgcaaaggacttacgcgaaattacgttagcggccaacgcagttcaacaggacagtgaactgacggcatatgaacgttaccagcttttcctctcgataagcgacacggtagcgcgtatgcagcagaagtaccaggttcagttaaccgtaatcgacaaaggcgctgtgatcccaccacaccctagttggcgcgtactgagaagcaaactcaccacaattgaatcgtggttaacctcgtaataaattaaatagcgcatagcccttctccccttccctcatcgggttggggagaaggttaactatgtgttatttttttacatccgtttagacaatgtcacctgaagtgtcgtcttctgacgttgtgtcggtcgtcgtttcctcagatgtggttgtttcttctgttgaggtttcctccatcgtttcggtatcgaaatcggtatctccgaaatcgtcaccgccaccgaagtcatcagaagaaccggtatcgctacttgaatcggatgaccacgaaccatcagatgaaacgctaccgtcctgtgcttgagctcccatcttctcttcaatcttcttcgtcagattctgaatatacaatgcaaaatcacccatgcatttacccatgacttcaatatgttccatggacatacgtttccaatcttgcacggcattcttcttatcgtcaagactgaagagatcagccagctcctgattgaagttattctcttttgcccacgtacgcatcgcggtaccaataatgcatgcgcggatcatctgcagcgttgtttcatcaaccccacccagacccatgacgtaatcaggcgttaaataatcatcaagttgcgcagtaatcgcttccttgtactgattatattcacgtacctgatcttcaaggcgacgagcattgctatccggtaaacgcacacgcagactgtttaagaacatggacacataagcatcggcaataacttcctggacttctggtttagtgtaatccagatccattgttgctgattggtcgtcaatctcctgataggcgttaacgttacggataacaccgttttcgaaatcactaccaaaaagctgcttcaattgtgcctgggaaagcttagacatgttcgcacgaaccgtgtttcgtaacgacgtcaacaacacgggactgtatgccgtatatttcttgatgtggtccgataacccattcgtgatcacctcacgacaaaccgtgaactgtttctcttgcatcgcgttagctgtaatcacagaagctgcgaattcagattggtaggaagtatcgataatctccggagacacacccaagcccatgaaatggtcacgacggtaacgatccatcagctcattatcaggagactgatagttacgctgctcaacactgacgtctgtattcaatttcgggaagcgtgggttattcccctcaaccttcaatcgaatcgagcttcgttcgtacgcgttgatgatatccatcgggttagtttcacccaacgggaaaccagactggtagacacgagcgaaactatgcagtgcttgttcgacggtatcgaccgggtttctgtcggtgtcttcaagcattacgcttagcgtcgtatagttcaacgaacttttgattttcgccatcagttcttgaaccatgagcatggctcgttgcgatgagatcatcttcgtactttcaagcagcgaacgaccgataccgtatttgttgtattcataggcgatgtaagtcaccatctctcgaggaataaacaaaacacgggtctgcttgtgagcgaggctacgagcaagcatcgacagataaaacgatgatgtcgcaccgatctccaccgcactgccaagataaccgttaacgatacgttcgacaatgtaacgttgcatcagcgattcgtacgatgatacgaaggccgacatgtctacctgattacatgacgtaccttggatcatgttcttggctgcaccaatcatctcgctcgccatgccgttgcttgacgtacctgcgatatctgcggtgatcttcgacaaccgaccttccaactgcttgtaatacgccgcatcttcaaccaaacgtactggataaccaaactcatccaactgaaccaaatacccgatatggttctcaggatcaccgggcgcatgtacgggttctaatgcctcaggtggtacatgcatcacgccaggatggccaacgctttgacgatcaagcgtatctggggttgccagcgcgtaaacgggcgataccttggtgtggcgctggatgttgagcttattccagatctcgttaacctgttcttgcgacagctcacgtcggttagcggttagggtcggatcgcctgacagcgttaccaaaccactacctcctaacgtgtttgcgcgtaacgcacgctgcactgctgtcgctgctcgacgttgatgcagaataggcatgcggaggatgtctgggttatcgacaaccgtaaccatatccggaatatcgatcttcgcttcaatgaatttaccgtccttatcgcgaagcagggtattggtaaacttgatgctgtctatgcgaacaacaggatcgtacggtatggtttcattaacacccgagaaataatcttccatcgaaaccgtcgcaggtaattgattttcgtggcgtttgcgactgtcgttacctagaagcccccaacttgcaaaatggttgtctttaaatccgtattcttcaagtttcagttgaccgttaccattaatggcgcggtcgagcgtgctttccggcagaacaacgaagttataactgcccttgataaagaagacgtcttcgatgatacgagggataagcgtctttattttatagatattcttaaaatgcgtgtcgatggtatcgatcatcggctgaacgatttctgcgactctgccggggaaatcttcgctgtcgataaacatctcgaccgtcttaagatcgttagggttcgtcaacgcggcaacatagatctgcatcacgcgtttaagttcagggaacagctcgaggatgtttttattatcctcgatgtttgtcgcggtcgcacgcgtaaccgtgttcatcgtcatttggtcgggaacaactaacccgaaacgaccgttcgctccttccgcatcacgtgtattataaagacgtgactgcggagcaggagcgacaaatttgttcatgagtgccttcgcaacgtcattattgctcatttgacgttcgagggcgacgcgccctttatttatatcgttcatttacactggctccttggaggaccgatcgtgtccaacactgactatcagctttattcggaaagcgtgcagcgtctaacggacaccctgattattaaaagcgacatcacggcagaacggttaaacctcaaggtttccgaagtctaccagatggccgtcggggacgacccacgcacgtggttatactacatgaatctcgctggcgagtatcatccttgtcagacaatgatgaccgtaaattccctggatacgctcgaagagatcgagttcactaaggaaaacatgttacggcatcgcatgacggcaagggagtacgcgtatggtggagattatttcaatcgtttaattgcgcggtacccggaacaacgtatgttgatcttgggtatccttaaccccatcgatatcgagaaagcaattgcggcacgcaatcatgagattctctggtacgatacacaagaggttgagtcacgcgaggccaatcttattccacgtttacagcaagaaatcgacgattacttcagacgctgggaacatccggcatacgagagcgtcgatatgcttcattggcctgcgctatacgccatcctattcacacaaatacctgagatgataaaaggtattcgttgggaaaactgtcatacccattatgcccatagcttccatatctggagttatctggcaagccatcaaggtctcgatcgattcaagcgatacatgaccgaatcccaaatgctctggttctatcgtaacatcgcttacgttgaaagaaacatgggcagaacggaaaactacgataagctcattcaaaaggtattaaccgatcgtggaattccaatcggtgcgttctcgatcaaacaagacgcttccgagataccccagacgttaaaacctgctgtttacatggagcgtaaaccgcttaaccttcaagagatcgtcggtaatggcacggtaagacgtaaggtcaccaccgtgatgcagcaacagttccctttagcgcgggataacgaagcggagtattataccgagcttaaccgcacgatagagaagatgtcgatgcatgacaacaataccttaacgaccaaggtgttggaaagtgaagccgaagaccttacagacagtgaactgtatcctaagtatgatttcctgctgaacgaatggattcatcttagcgcgataggcatgtatcagtcacggttaacgacaaccaacccggtgacgggtgataccatgacgatgtcgatgaaagatgcatacaagctgttcttgtatttgctgaactattcgatgggcatgacgctgattgaagtacctaagatccatgctaaccacgtcagggtgttaacgctaccgacattcgaccatctccgtagcattaccgatcctgctatcattcccgataaactgatctggtggtgtttggataagcaagtgacgctgcgtgctgtcgtcagtactgaagagtttctgagcgccgttaccgagatttaccagggctggcgtcgccatcagttcatgtatcagctccaagaacattatcaagctcgaggcatggctgaagcaatcgttgaaaacttctacatggatgttggtgtcgacttcggtattggacagctttacaaggaatggttcttatcgatggattgggagcttgacgcaatcagtcaagaagaggcgggtattctggctctcgatatcttcacaaaggccaccggccaggatttggaagatgtcaccagtcttaaggatattcaatacggaatgctgcagctgcttaagacattgagcagttacaccatccattttatccagacaatcaacagtgacccaatcaaaccactaaataaaatcgccgttcgtctcggttcgagtttagtaagtggtagtgaagaactgtgggaagactgggcacaggcaaacgttcatgatacggataaccaggctacggaagttatcaaattcgtgcatgataacaacccgatgacgaactggcgtgaatcagcggttgaaagtttggaagcgcctccgaaaccaacctggtgtgattgtagtggttacgagaacacccaaaccgttcgattcagtacgcaatattgggcacaagtcattagcgatcctgtctcgttacgtttccgtaaaaacccgctcgatgggttgtggcttgcaccattcccaggtcgggcaccacgcgaccttcgtgagcgtctgccatcagagtcgttgcgtgggttaaccgtaaccccaatcaaaccgttcgaacaacgtttccgtaaacgtgatcttcgaggtctctggatagaaccgatttacaaacagttgaacggtcgtttcagatcagtggctctaagtgagacgaatcatgttgcgtataagcctatcagtatgcgtctatcgaatccgctcaatcgtttgattgttaaacctttgcctatcgaggacgtttaacgtgatagcgcagcaaatcgtaaagtcttttttatctaattcctggcgaggaggtcaccgtgagtgatacggtaacaactattgacgacaccgaactttacccggtcgacgtctctttaccctcatccgatctcgtgtatggtcttatcaaccacgataacccacctcagaacggagagcatatcctaacccctgaattattggttttaggaacaccaaccaccaaccaaagcgcctatgagcgcgacacccagattacggcgacagcaaccgctaagcttactgagttagacgattacgaaggttcgacgacactgtattacgatcgtattaacatcggtgcgtatctgcgtaacgtagctcctattcttatcgatgcgccagacgccgccaagatgcgtgatatctggcctatcatcaaagaacgtttcggtcttggtcttaccgaggaagaaatcgtcaacgacgaacttaactgggataccgttaacggacaattgcttcgtgtcgcatctaactgcctggcttggacggggagcgttcgtatcttgatgaaatcgcgtgtaccgaatcttgatgatattatcgcgatcaaggagctggacggccttaagttcttcggtcaaggcgtacgcgctagcggcgagatttacagttacagtcgtgatacttctgattacggtgaactgctggcttcgctggtaacaggtaccgttattagcgatgtggtggttgccgatcttctggctgaaatgactaccgatcgttgggtattagacgacaacgccgcaccgtataacctgtataatgctaaagtggctttcaacggtgagttaggtggacgtattccagcacgagcaggttaccaatacgttatcgagatcagtctggatgaaaactactgtactgctgtcggcggtccattgattttctattacaacgtcgacggacataccgcaagcctccagggtcgttctccagaagaacaaggctaaggaataaacaatgagtcagaaattgttaaacaaaagtcctaaagtactggtcgctgaacttattcaggcagccaatcctgacttcgactttaacttcgatgcaattgatatcacggatgttgctgaaaacggaaaccacgcgtataaacggaacacacgcgctaaggtatcgccttcggcaacagtaacgccagcacaataccgtgaaagcagctacgtgtggtacgatcgtatccctatccaagacttcttcttgggaatggaaccgaagcttgctatcgatgctggggttaaaacaacgcacgatcttatccctctgattcaatcaacgtacggaatcgttatcgatcaggatagctgcgtcgattctccgatcgtacgaggtgatgaatatccgttccctcacaccgtagaattgaaaacaaccggattggcttggacgggaagtgttacgttctatctcctcgatagtgcccacgatattgcggggatgatgaagacttcggtgatgaccggtctcaatttcccgtactacaccgcaaatcgtatccaggcattggtctacagttacgctatagactgtacggctatccgttccgatctcgccgggttaaaagttggcggtaatttaagcgcattggttagcttattcaacaacgttgcgccaaccccatgggtttataacggccgtgaagacgaaaacaacctttacggagccaccgtgcttgcaaccggtaaaacaacagaacttatcgcacagggttatcctgttaaccctgcgttcgctaacgctgttatcgttacgcttagccaagattactgcacgaactacggcggtatcctgttgatgcaatataactgattaaataggaaaagacatggcttctacacaaatccgtgctaccgatcgtatcgtccgtacgattatcggcggtcaagtacaaactaaccttacgctcggtcttcctcacgcatgggaagaacatagcaccttgaatgaaaagcttcagattcaatcaaaggtttaccccgagggtaatcctgctgtacgttacttctgtatcggcaaccaaggtcatgaattcatccgcaacgctaacggtatcccttcctcgatgccgatcgctcacgaagcaagcgatctttcaccgtggaaaatcaagccgttcgtgatgcgtgaagttggtaacgatttgaccacagacgaacgcgctaaatttgggttacgtcgtattgagacactggaaagcggtaaaaagtatatctgttattacggtcgtcgcatcgatttcgataacgttgtccgctccatgcgttataccaaatacgtcgacggcgtcgcccagaccatcgaatggcatccaaccgacgcgaacctcaaccctgcccgaccggatattccaacaaccggaattctggtagcgaccggagagtactacgactacagctgtaaagtctctttggtttggacgccgtgggatattaacgaatatctcaatgtggctaaactcaccgaaggtggtgaagagtacgcggttatttctgaaattgggatggtctctgctggcgataaaatcgttcgtgctgatgatggtcaaggttcggccttcgacatgaacgaaatcgtcggcgcgcaggttaccgatctgatttcgacttaccacaacctttataccaccaacgatacgctgacgctgaaatacgaccttggtgcgttggaagctcgtaaggcaggcccgacgggcgcagaaatcctaccgtaacctaaggggtgttaaatggagtacagtgaaatcctggggttagaatcgaaagaaatcctctttcggctgattcgaaagcatagcgatttcgatgctcgaggcgtaacgctggataaactggttatcggtgaagcttctgaaagcacagggtacaagcgtaacagcaagttaaccgtgcatccccaaccgggttcagggttggtgaactctgtcgacatctattataaccgcatcgatcttggtaaactgggtacctggtctggcggacagcaccgctggcccatcgagatcgaaaccttagatgcattaaccaaggtctctgagatcctacctgtcttagcatcgacgtacggtatccttctcaacaaaaccgagattgtcgacgcggatctggataagtccaagtcaccgatacaggttatgataacacctaaacccggtaaccaagtatgggttggtcagttacttgttgagttgacctcaggacgtaatgacctcaacaacctcgttcgcaacaatatgttggctgggttgaattatatcatcgatcgagatagcagtaaactcccaggcgctattgtttcgtacaactggttcgtatctgccggtgttttggcatcacttaccgatgggtatacgttaacctcaggcgatacgcaatcggaggcactaatcgcagaaatgaacgcactgcaattgggtctctctgaagagatcgacggccttatggtcaacgatcgctgggtactgtcagcaatacctggaccgctcaacttgcagaatgcgaaagtaatagccgatccagagcaattcaaaacactaccgttcggtgtacgtacagatgttagtaaagctgtcgtactccaactcagtgtgatgaatacgctaatcgatggttatctaacgttatatgtagcataacagcatattccctcctccttcccttacgggttggaggagggttatgtttggttatttgtttttctgactggaatcgatcaattcgagcttgtgtactgtctgcaacgtcgcatgcgtttccaaccagacctggtgaagataaggcgtatcgttaagccgcttaacgcgggtatgtttgtacaacgtgttttcaaacagcatgttcttacgaagtccccagcgcgagtgaagtacccataacggtttttcataggtctgcacgtaagccggtaactcgccgagatcagctcgaatcaatccttccggtttcttacctaagaaatattgtcctggtacgccacttcgtggtaaaggttcttgcgtaacctgaatcgatgttgctttgatatacacccagaaactgcaaggatgcgtcacccacgcttttaatgctttatccgacaataaacgattggcaacaatgtcggattgcgggtcttcttcgttcaacagaataccaagagatgttagatcaaggtatttgcgggaacggaagtatcgttcatagagaaacatgttaatgcagtttattttcgctgtcgtgtcactaacgatcgtgtagcaatcgtcaagaagatgtaaatatcccccgaacaccagcgcgacggtttcatcttcggcgaccttgcgcggcagccgtaaatacatctcgtccttatacggcaagagcttcgtggaatcagcaatcatctcttctgtgatagcatggatttccaaactcccgatacggctaaaatcaatcatgccgatatcgttttcttggctacgctgtgccgtcttgaacccgccctggatatagacaccaacgtctttaccgtagacgtgaggatgaacataaccacctacggtgaacaagcagtgtttgccgatattttcgtaattcgtattcgctttcgtcaacaggatatcggtgcgttccgactcagggatcgcgttgctcggatgataaccgctattaccgactttagggagaaagcctaccgtaatagcgtcatgacaataaagcttgtgggttttaatcgacagctcgccaggctgtcctcgaaggttggtatgcgcatccgatttcgttttcaaccacgcattgagcgtgtcattgctgttttgaagctcggattgaaatgtgtacagatcaataacttgttgctggtcagcatagctttcatggacctggatcttgagtttttgatacgttgagaacaacgtactcaggacactttcacccgcctcaagcgctgtccaggccgtgccagaacctacgggtaatccgtaagtttttaccaatgtatacatgggagaggcccccttattttatagttacagtaatattttaccgctgttaacacaggataccccagggtatcccatacttactaacaacttgtaaagggcgcatcatgacagatgaaattaaacgccttccgtataacccgcaggggaatttggatggcgcatgggttccagaagaactcgtcactgtccgtccttccacggggaccggatttaactttctcgttcctaaatacgcgccatattttcgcaatgggttaaagatctacaaccctgaaacaaacgcgtatctggaagaaggcgttgactttttatgcactcaccccttccgtgccatggctgcgctgaccggcctggaattatacggttccatcatgctgttggacaccgcattcagtggacagttgcaactgaactactattcactggggggtgagtttacacttgatcaacaacaaattcttaacgttttagccaacaacctttacgatccccgcgttacgttctgggaaaaggttgctgacgttccttccgtattcccaccaatcaaccaccaacataatgtcgaaaccgacacaatgacgtgggacgatgtggtggctgcaatcgaatcattgaaagaaccgcttgaagaagggttcaataaagcaatgaccgcattgctgcagcacgagaatcgtcgcgataacccccatggcgtaaccaaggcacaagttgggttaggaaatgttcagaacttcacaacggcgaccgagagcgatctggaaaccatcggtgaaaatctgtacatgacgttggcgatgacgcgtaagatgatcgctaacctgagtggtgatagtgctgctgcgcacatcagcaactacaacaacccacacaaggtaacgaaagcccaggtgggactcggaaacgttgagaactacggtgtagccgatagtaatacaaccattaccggtacggccacagatctgtacacaacaccagcgggtgtacgagccgcaatcaaagcaatcaccgatggcttaagcacgcgtatcgataacgttaacgctacgttgacaacccataccggagacaagaacaacccccacggggtaaccaaagctcaagttgggttaggaaatgtattgaactacggtgtagcatctaacgtagaagctgctgcgggtgttgctaacgataaatacatgacccctgcgaccacggcagccgctatcgcaggattaatcaccccaacggttaccgatcacatcggtaacaccaataacccccacgctgttacgaaatctcaggtcggtttggggagcgtgcaaaacttcggggttgccaccacccaagaagctatcgatggtcaggttaacaacaagtacatgacaccaatacttgttcgttacgcaatcgagcaactggctggtcaagggttcagtagtcatatcgcgaataccgaaaacccacaccaagtaacaaaatctcaggttggtttggggagcgttgagaactatcctgttgcttccgacgaagaggcgcaaacgggtgaagcaaccaaccgctatatgacaccggctgcgacaaaagcggcaatcactgctttagctggtgatggttttgcagcacacgttgtcaataagagcaacccgcatgaagtaacgaaggtgcaggtcggtctcagcaacgtgcagaactttaatgttgctaccgatactgaagcggctgacaacaccaaccaatcagcgtatatgacgccgtattcgacgtataagtctatcgtggcgtttgcggcgttagctgaccatacacacaccgcagagcaagttggtgcgttaccgatcgacggtggtaagttaaccggaccgatcgatctttcggcgacatccatcacaggtgcaggcatcggtattgatggtgtcaatggttcaatcaacaccaacacgctaacagtcaaccagcttctggaagcttacggtggcattgaatccagtgatacgattaaaatcctgaacgacgatgagacacccgccaacttccttgccgatggcgatctcgaagggatcaaatgggttaacatcaacagccaagaacctggagagaacgaagacggcgagaagatgcagaagatcggtaagctgagcgattaccttaagaacgattatttaaccagcttgcagacgaacacagcgtttcgtgatgtcttccaagcactgcttaaggaattccttgccaacttcaacgcggttatcaaagcaaccgacttcgaaacgttataacggatgggtgggttctacccacctttccttctttttatttttcgataggatgtgaaaatgggcacaaaaatgagtgaattgggtgctcgcatgacgacatggtacgcaaggaaggataaccctaaccaagtcactgcagcgcaaatcgacgcacccgataaaaacacgatcgatacgagaatcggcaaaaagctccctaaggggatactccccgtagcgtatttcggtgactgtaccgatattcgtagcgaacgcatcagcaacgttactgccagcggtacggtaatctcgtatcctgaaatacccgtcatgatcgccggtaccgactatattctggcgaagggaacgctagacatcaaaaaacttacttccgactgggcgaacaaaaccggttatcttttcattcgtcagaaagacggatcgatcgattggatctggcagagtagtgctggggtcgatacgtcaacagcaattcgcgtcgggcaggtgagctgtaacgcaacaggaatcacttcggtggtatttaacaaagtcttcatcctcggccaaaaacgttacatggggtaaccgcatgaagctatcaacactgctttctgaatgggggacgtatcttacccaaaagaaccctcacgaggtaacgccaacacaaacagatgtctacgttaagaccgaagtggcccctaaacttgcaccgcttgttacccagcgttaccttccgtttcttttcttcagtcgaaataaaacgcttccagcagccagttacagcaacggacggatcagcattggtcaaggtacagcggaatacaacacggtggtagggacggtgccagcagcaactttggacgtgtcaggtatcagtgagtctgtaggctggatctatcttgccgtaaccgatagcggttttgtttacacgctgaatgatagcgatagcagctacaaaaataccatgcgtatcggtacctggaacaaaatccagggtacatcacatcttgctgcaacacgtaaggtggccaccatcgagatcgatgatggtcagctacccgactcgcctatttaatcgaggtgaataatggcaatgaaaaagttcagcgaactggtgagtagcgttactacacgtatcgccagtcgtgacaacccaacgggactaaaggcgagcgatctcggtgcctacagtaccgctgagttcaacactgagatggaaaaatacatcgatattggcgcaaccgatatcgaacaggttggggaccaaagttattttcctctggcaatcgaaggttcggccgatggcgctatcggtttaatcaccgactatcgccattacggtatatgtcgtgaatctgacgggacgatcgtcctactgaggtcagcgacaaacagcatcatacacggtgtatattacgttatttgtaaaactgatcaaaatggtgcagttactagcgtaataccaacaagccgacagtaccaaccagctatgttggatctagcacctaaagccatctactgtcatcagaacaacatactactcggattagcggctgatatcaacggcaataacgccaaaatgttcatcgcgttaacggacggcacattcgacgccagcaaacacgttgcgatgtatatcgacggtgctttatccgatttcaaagaaacaatgcccgatgtttgttgttgggaaattaatggaactatttacattggtatagctattcggagcggctataaattatcactaaaaatttacaccgttcaacgttcctctatcgcccctacagggggtagtgtatcggcaacactgattactaacataaacggcgttacaattgaagggactcaaataaacaacagcagcgagctcgttgtctgcaacagcatcagtacgaatagtttcccgtccaacgggatcggtcaaatcgtctggcgcgccgcaatacgtttatggtccactgtaaaaaatggtaaagcgcgaattctggtcggttcgtcgtggtggacaaatgatcgggacaaccgtcgacgtcaaggaatgcatcatttttacatcgattttgacccgaccaataacagatacgccatgaatccaggatcgggacaagctacatactacgccgaatcgaacggcatcgcgtggcgaggaccgtcgacatttacacaaggagaatccaattataaagatggatattgggtgtggggggctcacaactgtatcggtaatatcgatatcaatgattctgggcaagtaattgctgtacaaaacgacaataacggacagccggatatacgtacgtacactatcggaaacttcgcaggcacagcttacgatgaaatagccaaaatgaatcccgacagtacgttatatacttcagcttggttaaagataaaagacagggtagttggagctctggcagcgcatggatatctcgcatttctatcagcaaccaagatatacacgttatccagcagcggtcttggacaaggccactacgatgcacgtaccgtaagttatcaaggtagttggacaaactaccattaccacggtaatggcatcgatgtctatggtttcatgccatcgagtaactttacggtattaaactccctggctgcgccattcttgacaatttatcgtaacggtaacgtcacactcagcggatcttacttaaacgaccttcgtctatccagcaacattggtctcaattacgacacgttaatccctgagggcgaagccatttctatttctgaacagaacctgaaatcggctggacaaaccgtctggaacgcatatactggaacaaaactcagcggaatcaccgactggaaacaatcgataacgattcctccagaaacaacaaacgcaccgtgtttaatggttgtattgggatttaacagcagccagcggaaaatgggtgtcgtaattgctgaagttagtgtgtcggcacgcaagggttcgatcgctataaccggcgtacaaaaggtgatcgcctacgttgaacgtgttgataccgtgaatatttgggccgataacagagcgtacggttcgttcgcgtatatgcaaagtacagatggttggttagtggcgggacatgtccctcttggccgaggaacatctggaaatagcaatacattccaatttagggctggacgaaaaagtgatggtagttgggtgaatgcggcctatgaagacttgtatacatatttacaaaacagtgggtaccgctggaacattcatccgacttggggtatcggctacgtaaacactagcgaatcgaccattatgggtaacggggggcaagtattcaatgtcataggtaccacaatcgacgactataatcgtggtatcgtcgcgtctcgaataatggcctcaacagtcatcgcttcttccggtttcgacgtttatatcaacgaggatatttcatgtttgtttgctggtaaggccatgaccttacctaaaggccattataacctaaaagactataatagctcaccaggtaataaaacatggtacgtttccgttgttcctaatggtaaccagttagagctggaattaaccatccacaagcaagaggatgataaaggacagcgcgttaatatcggcaccatcacgaccagcgatacccagatctcagtcattaatctcaataagacaaccaaattaggtacagtcacgttataaggacctccaggttatgtcaacaccaattaccctgaagtaccccgaggactggaccggcacgctcgatagcaaccacatcgttggtgaagagcataccgttccacgaaccgagaacaaatgttacgctcttgatggcggaccgttcttcaccgaaagtctggtcatcactgaaaagcttaccggtaagacactggtacgcggcgtggattacaaacccatcttcttgtatcaggacgctacgctttacgctggtaaagaaatctgtgcagccatcgccatcatcaacgatgatatcgaggggacgttagttaacgactatcgtatcatcggtggtgtttacgtaagtcttattgacgcgttgtatcaggctatcgaagaactcaaacttgacgatcgtccgatcaactgggacgacatcaagaacaaaccggaactttatccgcctgaaccacacatccaccacgttagtgctatctacggtaccgaacatctttgcttagcgatctattcactgaaagccgcaatacttatcggtgatgctgcatccgataaccgtctctgggcggcaatcgatcagttacgcaaagacatgcaagcagcggataaagatctgaccgatctgcattacgcacatgctaaccgtaccgataacccgcacgaaaccacaaaagcccaagtcggactaggtaatgtacagaactatcctactgccaacaaggcggaggcagaagccggtaccgcaccagaccgttacatgacagcacaaacggttggatgggcgattgctaaactggcgggcgatctagtcgacgctcacgctaaccgtcgagacaacccgcatagcgtcaccaaagcacaggttaaccttgggaacgttgataacttcccgaccgcttcggatgatgaggcgaaagccggaacagcgaacaaccgtttcatgacgccgctacgcactgttgcagcgattgaacagttcgcattgattccacttaatgcacataaagccgattacaacaacccacacagagtaaccaaagcgcaggttgggttagggaatgtgcaagactatccgatggcttctgaagaagaagcgcgtgccggtgttgcagctaaccgattaatggcaccgaacacaaccaaagcgtccattgagacctttgcgttagttccgcttaatgcgcacatcgctgacaagaacaacccacaccaagtgtctaaggcacaagtagggttgggaagcgttgagaactatccaaccgctaaccaagctgaagcgcaaggtggttctgcaactaaccgttacatgacaccacagtctaccaactgggcaattcagaaattagcgggtgatctggttaacgctcacgctaaccgtcgtgataacccacacgcggttacgaaagcgcaggttgggttaggtaacgtacagaactatggtatcgcttccgatgcgcaagcgcagcaagatgttaacaccgtgtattctacaccacgtaacgcccgcctcgctgcaacgcacatcatcgatacacgtttgttctggggttcttacagcggaaacaaactggtcttcgttgatggtagtggcggtacgcgtttaggtaaacatgtcatcatcacggagaatggtggcggtgagatcacacgcttctattgggggaactctgcaggcggtggtagtgcgctgtacttcaacagcaatatcgatgttcctaacgcttacattcgctcggatgaacgtagtaaacatgacattcgttatctgaaagatcatccggaatctttcagtgatcgtttacgtgaaatggcgtataccggacttgcccgtttccgtcacaactacgatcctgatgtcgagaagatcggtgttatcgcacagcgtgttcaagaacagttcccggaaatgatcaacgtatcagataaagggctgttaagtcttgacaccatggtgtatagcggggttctgttgggtggttggtacgaacatgaccaacaacttcgtgctctgcgtgcaatggttgaagaaattgcacatcacgtgaagggaaccaagggtatttaattcaacgttctagaacgcgttgtaacgcttcgaaaagtttaatctagggtttgcctgggttaaatcgtttatcgcgttctagacccttcctgttcctctaaatcgttatttaaacgaggagttctaatggctaagattactgagaaagatttcacgtgcgaatttatcattcgcgataaaaccagcatcgaagcaggttacgtcgacgatcccgatgattcgggtggaatcacgaaccacggcattacgaaaacactcgccgatcaatacaaaaccacgctgaaaacgaaattcggctgggacggtaacatgcgtaaccttaccacggaaatggcgttctttatctacaagacccacttctgggataagatgaaacttgacgaagtcatgaaacgttctgtgttcttagctgaccgtctctttgacctgggtatcaatgctggcaaaaccgtcccggttaagaacctccaacgttatctgaacgtcatgaacaaccgccaaacttactggaaagatattgatgctgatggcgcaatgggccccaaatcactggcggctcttgatgcctatatcgctaagcgtggcgcaaccggtaaggattatctcatcgatgcaatgctggacatgcagagcacctattacatcgaattagcggaacgtcgtgagaaagacgagaagttcatttacggttggcaggcgcgtaaacgtcgtgaacgtaagcgttacgaagctatctgtttgaacggtttcagtgttgaataaaaccctgtcgtaaaccgtcctaaaacgctccagaacgaacggaacgcataaagacgtataagacccctcctcacccaataacggatgaggaggggcttaacaggtgttcgtgtttattcgggttggtctgggtccctggccgcttgaggagatccacaaccctttcaacaccacgcttcatacgaagcgctcaatgagaaagatatgcgtgcaaccacgcagattgttacaaccaaattgtagaagagcaatagccgagctgtacaaaacccatactattgctctatgtgcttattagccaacaacgctaacggtcggtttctcgaagccttcagctacgttattcgccagaacggttgccaggtcatctttcggtgcagctgcgtaggtcagtgcaacctgcagggtgccggtatataccaggccgccctcgatcgcagtcagagttacctgaccaacagtacctgcagacagctggaaggtttcttcctggatttcaccggtcagggaagccaggccgaatttggtgaccagcttacttaccagttcagaagcctggatgctgtcagtaccgtgcggcagttcgaaagtaacatcgccggttacatcagcgaaaacgtcagacagagccagacgatcgtagtagaactgctgactaccctgcaggttttctgcaccaactgcagcgtccagctgaataacggtgttcttttcatgttcggaagatgcccccggagtaccgaactgcagttcttcttcagccaatgtgcgggtcgctttggtgttaataagatcaagcagaagggatttcgctgctttgttaaagtctaaggccatgattgtgtgtcctctgatttttgatggtcgaaaaggagattcggagtcgttctccatattatttacattaatataaaatatacttatttctgtaaacacttacatcttttgagagtgatgtaacaaccatagaggtagaaaatggcaactcaagtttcacttactttaaaaacaccttggcaacttatcgttgatgagatcaaccagctcaacgccgacactggtgccagcttccaatacagtgatcttaaatacgttattaaatccaaaagcgcttctgctccagaagcaactttaacgcttagccctggtgaaggtaccccttacttcaatgaacgcgatgttacctaccatcgtctggatctggctaagtggttccagaagatcgccgtacgtgttaacgttactgctaacaccaccatcggtgacgtggttgaccttgtagctcaacgctacggtatgatcacgccttccggtgagaagttcctggataaagcgaaagacatcaaagccgatacgttatctaatccggttaccttcgacgagcatggtatccagacgatcaccctggaagccaaagaagattcgttggcgtggtatggctcggttcaagttaaagtttataacaccacgctggatctggctaacatcatcaaggttaccaacctgggtaacttaacctacgttgatgaaggcgatggtaccaaaacgtcagcacgtctgttaacctatccgttagacttcagcacctatactgcaggtttacaagctattaccagtaacgaaaccaagatcgatgcaagcctggcaggtaacctgactacgctgatcaaagaacagactggtgtaagtgatgatatcatcaatgaactgaaaaccaatctgcaaacggctacctttgtctataacggtgttaccaccgggtctaccgacaagggtgttaacgctacgtacagcaacgtgttggtggtgtcgttaaccgacggtacccacacctacggtaaagcagtattcggttataacgtttccgaataatttaatctctcccttcctccaacccaacagggaaggaggaaggtttatgtttgtgtttattcttctcttttataatttctaatgataagattaagtacctggagtaaaagtttacagatgttgtaaatgtatttggaaagtaaaatttccacgacctcggccccttcgggggacgggggaggagcgaagtcctttagagacgagcaacaggataactctaagaaaaagaaaaactaaacgagcgaagcgagtttatgtttttatccttagagttatcaagctatacgcgtagcgttagcgtataacggttatgtcgtatacgaatgcaatgagtatagacgagatactctgatgaacaacgtgaagaagagtatcacaaatgttttttgagttatccgatttaaccagcatgtaacggagtgtaatgcacagatgacatgtgttaccgttaaggtagtaaacacatgttatccattgttttgaagataagcttattgatctaatttaaacatacaaacaagataaataaaacaacttaaacctaagataaacaagataacttagacaatacagataacatcttacttacttaaatcaaaatacctatcctcgtttaccttccttgaaacacctcttctaaatccatcccttcttaaaaacaaaacccttacagtaacacaaatcctttcacgactatattaccttagtgatagatacgtacaatgttcgtattctgtcaaatagaaatcaatacgttgtttaattaacgtgaaacagaggaactttttagatgaacgatgaaatcatttttgataccttatacacccaaaaagagtatcaggcattacctgagcatgtccaagcggaatgcgtgaaggtgcagtggttcaccaatttgcttgatgggccgacgatgctgcttgaagacgagagaaccgtaggcaaggtgatatggcgtggcgcatgcggttatctttacgacgctcgcggtgacggagggctgtatgcgcataagagccagcatcccgcatcgatgagcgcaagcaggttggtggtacatcacggttatcgcaataagggcgcggtggatgatgtcctggatccattgttcgccgatcgggttcgttgcgttgatcggcagtacgcgatgctggccggtaaacagcaggtctggtcaatgaactcggatagcaaactgagagaaggggatcatgccttgccaagttggcgtaaccataccgttggaacgtattacaccaaaaagcttaccatggtgaaaccttacatggtggatggcaaattggaggcaacggatcggatgcatcaattgcttcgcatgttttatccacgggtagtccatccgcttggattcgcttgggttagcgaggtgcgttacaacccacgcaagaaacgtgttgaagcgaaggtgcttggggaacgttggttgccggttgcgcaacaggggcttgatgacgaatccatcatgatgcgggtaagccgaagccagatcgtacaatgggatgctaccatgctacgccatccgcaacacattacaggagaaacgttcgcatgatacgtgcaacgggatacgagaacaaagggaagaacagcgtgcagcgttacatcgctgacgaggaagggaaagcagcatacctggattggttcaaccgttacagtgcaagcaaggtacgtgatcctagcatcctgaggttacagagcagttttcaatggcaggcttccgaacaacgttggtacatcacgttggaaatcggaacggtacgggaagaccagcttcctgcatgcttaaaagaacaacgggagcagatcaacacattactcgcacaacacaaaacggaacctaaacattaatccaacaccaacaagcgaaaaggaaaatacaacagaaatcatgttgatgaaacccacagcaaagaacaaagtttataaagcgatctacgcgtcagacacggttagcctgacgaagatcatcaaatacaaacttgagaaggtgctacgtgttgaaccgagcataggcttagtccgttatcgcctgattaccgagaacggtgaagggtattacgcaccgtcgtctcgaagcgataacgccgttgtgttaacccgggatgtggttgaagcaatcaacaacggaacgaaggcgttctacgcgcacagaaaagccgtataacgcaataaacgaatccaaagaagggaaactataccttaacttaaaacgacgcttagagagcgttacaggagcttagaatgcaacatgatcaaacgaacaccaccgcaacgtcaatagcccttgccgatgccgtccaggcgtggaacgagaacccagcctgtcgagcaaagatggaattggtgtacgaaggatcaacccgtgtcaggacggctgatgatgttctggtcgtacgaggtgaattcttcgccttaggtgtcacggaccgtggtccgttagatgcgctttggatcgagttacaaacctgcccgcagagaccacgctacgtgacccgtgaccatcgtcctgagaacgcgttagtcggaaccggttccgtggatattttcatctggcaggataccctcgacaacatgaacaagatgatcgacgttgagaacatcgttgcaaataagttaacccaacttaaagaacgtctgatgccgctataacgcatcaacatcacccgcctgtaccccatcgggttcgggcggggcaataagaaaccaaggggacatcgccgtccccgttactatcatcaaccactatcaagaggaacctaccatggaaattaaattctgtaaatcgatcgcgattgtacctgaacaacctgcggatgatctcgaaaagctcgatcatcccacactgcaacatgcgctggaacgtttagcctcttttgcgccgttagagaatcatcttcactgcgttaatcttgaagcatccgacttcgacgtgaagcttgggttcgtgttttcacaaacggggaaggatgtgttagaaaacatattctggtctgctgagcataaggcgagaaatgtgatgacgaagttagtttataacgttagccttagtgaagacggcacctattggacgtcagaggcttgctggacgatttctgcgatttcacgaatggacaaaatacactatttgcatcgtgttgctgatagcattgtacaccaactggatcgttttgataccacccgcttatcgaatggaacacagtgttaatacgaggaatcgaacatgaaaattaaatggcctaaatcagtcgccgaagagtgtatcggtgagtatagctcatcggttaccgagcatacgcggttacatcacacgttattgcttttacgtgaagacgccaaactccgcaaacatattcaaccgatatcagcaacctactgtaaaacgtcatcgtacctgtactcttcccggttaacatttgcttgcactgcgttagggaaagtattgctagaatccgcatatcttcgtagttgcgagaacatgaaattgacgggtggtatggtactctcaatcgatgtgctttgtttggacgatggaacacataaaccccagcttgtgtgggaagtatatggattgaacccagccatgattaagacgaagttcgactggattactgacggtcttaatgagattctgaaagaaggaatttgatatgcaacaacgtatcggtttatcgttagctattgaccgactgatcaaagtctcatcgttgcgaagtgaatttgttggcgtccgtgaagaagctgcgaataatcgctttattttaacgtttacgtgtaccaagaaaggcgtgacggttatccgtgatgtttggagtgctgtgaacaaacgcgaggcccgttgttctacatctgtcgttgattacaaaaacctggataatacgtacactatccgtttagaatgggagcatcgcctcaggacatttgttgaagttcggtcgaagctgttagctgaattgttgaacgaagcctgcctacgtgacgagaacgctacagaactcttcagaacgctttaaatcaatcttagataaggaaaccccttagaaattaaaacaaaccgttatacgtcgttctgtgacgtttaagctatacattgaactcatggcaatcgaggaaagaaaatgttaaattcaacttttacccactatctccacacctatgcaaaattatgctgtgttgatatggaagagctggcgaacgataatagtgttcgcgattgtgagatgctccctaagcgacaaggttttctacctggttctcggtcagcggcgttcttcttaatcgcttacttcatcgttagtcatagtgcggcgctgttgagccaaaccaagaaacagcgaaaggattacgctaccgcaatcactcaagtctatttcgatcgtcttcacggacgtgcggtgagtatcgataccgcgttaacgaccgcgtttcgtcatcgaggcgcaaccgctgtacagatacccgctttggttaagatcggaaaagaaatcatccagaatgcaacgcgttaataaataaactataatcctccttccccggccttgacggctagggaaggaggttgtattgcatttctttttttcttctgtttattggaacgggtctgtacgaccgctaccacgatctacaccaccgtgatcgtgggtgtatacgtttgttccggttggtgaacgccaagagcctgcgatgtgtacgaagttcccattcaacgtcatcgtgtttccgtcttcacctgtgaagcttacagctccagtgaataccgtattaggacatttaaacgtggtctgtcctgatacttgcgcggtgtaacgatcacacttcaaagaaacattctgactcgtaacgctttctgttttgctggtacgttcaaagttctcacattccgtataaatattttttgctttcattcggatatcgttcttagcgattgctttgagcgtatcctcgcactggaacgtgatgttcttttttgtcacgtcgatgatgctgtcgtcctggttttgataacgcagcatatgctcgacaaaatggagtaacaacagattttgatgaacgctgtccgcaacctgtaggtaaccctcgtccagattaagttccatgtagacttgggtaacttcaccaagctgtgcgctggtgccgataaccgctttcttgaggaaggtatcaaccattaggtaatagcagtcttccgttgaaatcgatttacggtccttcttggcgctaggacgtgcgctgacggtgaggataaccgattccatggtcatcagctcgctatcccctcctttgggttgccaatagagttgttcttcatccgcggtacgccaaaccaccacacgctgacctttcctcaagttaggtgctgtcatccggttactgccgaagggtaaccagtaacactgtatgctggttgttgttgccgctttcgccgtatagctgttcccttgagcgtctgttgcactgacttctttaacgcttcccaccgcttcaactttcccatcagcgcctgacatcatctcatcaagaaagacctccagcgtctggttaggatcttcctccagacttttattggaaaagtcggcagcaacagtacccaaggcatagatacggaaaacgcttacgttgttgtctggagctagctgactcccttttgtgcgattgtctgttgccaggtcgctcatgctgtaatctcctactgatttaaataacgatatagaaaataacgctgaagtatggcttcagcttcgcattctgaacccgtggttcagaaggtatcgaagaaggattatcatagcatgcgatgcacctatctccacttacgtggattcaatcgttttgataccgggatgattcgggagctggtcatccggccagataatcccgtacaactcattttaggcagtaatggttccggtaagagtagtctattgcctttgctgtatccgaccgttcctgagcgtgctgattttgataaagacgggtattacgagtaccgctgcgaacaccgtaataagcaataccgtcttatcagtcgtttagaaaaagggtttaagcatgagttctacgttaacgacagcgagaacctgaacggtggtggcacacaaccggcccaatggaaactgattgaagaacatttcgaacttaatgatgacaccattcgtttgttgctaggttacgaaacggcttatcagttcaccgaaatgggaccgatgaaacgccgcgaacgattaacacagatatgtccggttaacgtcgattatgcgctcgagttgtttcaggttgttaagcaacaagtacgttcactgaaagcggtgaatgagcatacactgaataagttggttgaaacatcacagcgcattgaagcgaaatacacgggcaccgaccaccagggattggaagcagagttaaaacagcaacgctcagcgctcgaagcgatgatgggattgccgttattcgatagcgatgttgatcaacgacagcttctggaatccgcacaacgtgcccatcattttaatcgcgagcttcttcgtgcggttgttcgttaccaaggaggaacatcgcaacaagaacagcagaatctggctgaactaagagagcaactcgcgaatgcgaatgcaaaactcgaaagtcaggttgacgagctgttgggtatcgataatatccttgaccagttgaaacagtctggcgaaggtgatatcgatcaaattaaagcccgcattgcatgtttggacgaacaacttcagcaagatcatccaggtgagcttttaacgatgaatctggacgctgcggtttgtttacaacagctcacacaagttcaggctccgttaacggaactattgcaagaatggattgataccgacaacacctatcatgtttacgatgctgaagcttacatcaaggaggaagaggcagcaagaatgcgtttgcgtaacgcgaaacatgcgttagccgatttggaagcgcatctcgaccatctgaatcatcaaccccagaccagctgtccaaaatgcaattatcgctttcatgttggtgaaacggaaaagaccagcaaagcgagtattgaacaacgcattcagaaaggccgtgcttgggttgaagaacaagagaaatcgttagctgagcttagcgagaaggttcagcgttatacgctctggatggaacaacatcgtcagttaacacgttggacgaaggattattacgccattaaacccatgtgggacaatctgctggaagaaggacgtaaaaacggattaggattccgcagcattggaatcattaatgattggttgcttgcattcgagaaactcgcacgttatacacaagccgaacaagaacgtaaacatcttcaaggcatgctcgaacgtgtacaagcggttgatgttgaaccgttacagcaacgtcgagaattgctttataagaacaggacagagttgttaacaaccgttgagcggttaacacaagccatcacagctacggaaggtagattggaaaccattacggcgattatggaagatcaggtacgttctgataacagcgataaagcgttaacgcaactgtggttagagtatctgcaacacctctacacgaaatcgttacgtgctgcgatgtctgatacagttcgccgaataagtcatgtcgaacagcaactacaggaagctaaaaccgaccagcagcttctggctcagttggaaacgacacaaaaagaggtggaagaacagctcagttacgcacaacttgttctggatgagttgagtccatccaacggactgattgccgaaacaattgcgggtcccatcaacgcgttcgttgagtacatgaacggcatcattgcgagtatttgggaataccaacttcagatactcccgtgtgctatcgacgcgcaaggattgaactatcgttttccgcttttaactgagaagtatccgacaccgcgaaaagatattgtttatgggagtaagggacaaaaggaaattatcaatatcgcgttcatcatcgcgatgatgcattacaaggggtttacggattatccgttgatgttagatgaattcgcatcaacatttgatccgcagcaccaatctaatgccatggattttgttcgtcgtctggttgatggtcaccgcgtaagccaggtgtggttcatcagtcactatgtgatcaaccatgcatcattccgtaaagccgagtgtatggttcttgataaaacgaacatcattctccctgaaacatataacgaacacgtcacgattatttaagacaaataaggatttctgttgatgaaaaaacccatgaagaagctaggccatgcacgcaagcatcgctattccgatctggagaaaatgtttttaacgcagcaaccgtttctccagacctactttaacgggatggcgaagaagttagccgatgagtaccaggagcgtggtacaccagcacgaattacaatcaccgtaattccgacgttcgctgaaaagatttataacgtcatgacggagattattcccgaagacgcaaaatcccaagatgaagttctgcgattaacgcgctacatccgttttaaagaacatctggacgcacaagcgaccatcattctggaaaacgaaaaacctgaacccaacattgagcttattgcttccctccttcctgaccgcctattacacgattttgttaccgtgaaacgtatcgacgaacaaggaaaagaagttgaggttcagctacgccaagaaaccgtggttgcgttggattggattgaagaccgttgtaaagcgctgagcaagcttctggatgatgaagggacgaatgctcgtgttgccatcgatttcggtcatgaaccggatgacgcggtaaccatgatgcgcgtgctgtatgatcccaaggttaatgatcatgcgatcatcgttaaacgcgaaggcgttaaaggcgaagtcactctggttaaagacctgggtcctattcacgcgataggtttaaccgaagaccaaacgccgttcgaaaagctttcggtgtatgagcaatcggaagttgaacgcttcctggaaggtgttgttgcgaaaaccttcccatggtcagtagaggctgttgtaacaccatgatcccaccagaatacgcttacgatattctggcaatcgaccctggcaccgatacactcggtgcgtcgttactacgtttggacgtgcgtgtcgaagatattgaactgctgtatgcagggacatggcacgcttcacgtcgatatgatcccgatggcgatattgcgcttggatacggtaatcgtgccgcacgtatccaagaacaccgtcgttcactgacaacgttattgcaagagtaccagccgcaagcggtcgcttgtgagacgccattcatcggtcgtttcaagcaaagcggtatggcgctcagcgagctgttttcagcgattcagacaacggttatcgattttgatcctacggtatctttcttaggggttgataaccgaagcgcaaaacgcgctgttgggattatgacgtcccgtgttggtaaggacgatgttcgccagaaagtgttgaacctcatgaacatcacacccagaaacggtgttgtgttagcgaatcttgatgagcatgcgatagacagcatcgctgtaggttatttcgcagccgaactcctgttcgaagaatggcgtattcttgatgaccatcgaaatgggaaggtcggtacaaaacgccgttagaaacttgtgcaaaacccaagaaggaaacagaaaatgactaaagttatctggggatcagatgagaacaagaagtgtactcctatcattcgcggagcagagaagtgcggtaacaatgagttcgttattccgttgttgaattttgcgagaaaggatatccagatcgatgaggaaataatcaatagtttccttcatcgtgtaaacacggataaaccgaacgtggttgcgggtggtactgatgcagtaaaatgggagatgaaagctcagagagttattgtagacatcaatcgtgttataggacgagtgaaacgtgcgtggttaaaagacgatatcgtctatgctgttattcatctcaccgatcgtcccgaagcaatggcgtatgctagcatgcttgaagaagcgaccaacgatattgatgtttttgttccgtatgtgtgcaattgcccctcagtcaagatacggagtatcggcgaaattaccccaattgtttgtcttaataaaacaatccttttcaactggccagttgaaaaggaagacagatccgtgactgtaacagcggagcaacttgaacctgcagcagatgaaatagtgtcgccagcggtaatgcgaagcgtcatcgtgagcaactcaacattgaacaacgaatctatcatcctacgtggtattacaccgacggaagatggtaatgcgttagtagtcagaattccggaacttaataaccgtcgcgtgtttatcggatgtgttgggtatgaagttctgtactttgacgcccaaggtcgtgctgtgattgcgacaaaatcaaagttatttaaccagcataaagcgcaggcgtcagcaacccaaccatacagactagcgtattccgaagataaagtaacgatctggtttgtgaatggaaacgatattcttaataatgctttcccagagaaaacatttaaaccggtgacgttaatagaaatgttcggtggtgaggcatacttagctaattgcgttaatggtcagttctgtctaccctcctgctgtgggttcaagacggatgacaccattaccgtaaacaatgtgcgtgtatatttaataagaatcgacgctagttccggttttgcggtgtttgaaccccatggcacgattctcgaaaatcttaaagaggcttgtaagatctcagaaccattcggtgatgaacgcagccttatcatcgttaaacgtaccgatgtcgatcgggtcgagattacagtatcgcagccgataacggcgaaaacgaagtagttaattggagcggggaatgtctcgtaataaatatatcgttattgaaggtctggattattcaggaaagagttcggttatctcgtctttacacagtcgtttaaacaacgtctgtgtcgtacgtgaacccggtggtacgctctacggagaagccattcgtaaacttatcctggaagatcagacaccaacgaacagattcgatccagaaactgaactattggcgatgatgtcgcaacgtaatcatctcttcaacaaggtgattcatccagcccttaacgaagggaagactgtgcttagcgatcgttcgattgcttcgacgtatgtttatcaggttaatgatgccaacgttaagttgtttgacgcattgttgccgaacctaccgtcgattatcatgccgtcttactatgtttatctggatatcgactatcctacgtatttaaggcggttccgtgttcgtcacgctaaacatcagatgtttgataacatcgatgaagcgacattcaataaacgacgttatcgttacatggattttatggactatctcggcgacgcgaaaacgctgcgtatagataccagtaacacacattctcctgttgatgtcgctaatcgtgtttacgacaatctgttgaatgcagggtttgttgaataacgtttaacggcatatttcatcctcccttcccttacgggttgggaggatggtttttatgcgctttctacttcaacgataaaacgacggatttcaccatcagaggctttcaatgtttgcgtgtaggtgaattttgcgatccctgatggcagcaatacatgatcggtattttctgtatcgtgttggaaatctttattggaatcaagatcgatactgtttaaggccttccgtatacgcggcatcagtggataaaaatcaccgagatcgcgtaaccctggaatgggttctaatacgattttggtttcagtgccaacaccattcatgacaggcgttgttgaagtaaattcaacgttcaaattgctcatgtttataaccttttgtttaacagacgatgaataatcatgcataggtgttggccctcgtgaagacgggggcctcgacgatttctcgtcatacactaatgcacacagtgttttcagcgtaatacattatgcgtattacgcctttcttcagccatgatagcaacagcgtgtttaacagagaatgcgcagatacccgccagcaatgctctctccattagaatgagtaacataatcatctccctcctttgtgttatatacacaccattttcctattttgttaattcttattcctgatatttaacagcataaaaagcctgccccgaaggacaggctcgataatcaataacgacgtaagctatctacggtattgccatagcagtcggtaatgtacacactttcattgggatagatgaaaatgaaacacgtggtgtgcgttgttgtcgatgtataatcgtctacaacagtgggttcggtatagcgtagaacaccaatcgcttgacttaaacggtaattgttttcatcgtttatcatagcgtaatgttcatcgcatccatcagatttaacgacgaggttgtgatgtaccgccctaaccccagtaggctcttgttcttttaatggatcatccaattcgatatcataaccaccatcggtggtgggtgttgccgtagcgagaaccgatccgtatttctttaccaggggcgataagctggtatcgatcttcgtatttggatcgacgtcgtcaaaaagtaactgatatgttaacttggcgaattcgggatgaatatctttaccgagctggttgttcagggcagtaaggtattgttcaaacgtgttctctggattaaacacacaaacgtcattaaaatcaaccaaaacgtttgataaaatttctgcattttcacgcacaacgatagtcgtgagacagatttcccgttttctcgcatcccgaacgaagtgtcgaacggcatcaccgattaactctgcccacgtgataccgttgatacagtcatcagacgtcagtgttctcacggctttatttttagcgtattcgaaagcctctttgaatacggtactgttccgattacctagaacaggatcggtcagatacattggttggctattgccgttggtaaacaacttacaaacaaatactttttccatgatagattcctgtttcaaagatgatgattccgaagatgattggtttaggctaaaagcctataaaattagctgcggttgcggtatttaacttaatccaacatttttcacggctatattacttaagtgaagtaagccagcgagatttcaatcatggataagactttcagtctcaccgatgtggaacaacaatggtttcctatcgaagtgattgaaagatactttcgcttggctaggaaactcgacataccgcaacagctacaccgtttgagtgctcgtggatgggtaatgctgaaagccttacgtgtaggcgcaaaacgtttttacgctttcctgcacgagaaacttaactgcacatgtaaaactgaataccgccatccacgatggtttaaatcaatttcgtctcaaaaatcgaaggagtctatcatgaccaataaagatcagaaaatgaacaaccagccgtttgaaccatctgaaacgactgttgaccaagaatccactaagcaatcaacttccaaacaagaggaaaccaccatgaacgtacgttatgataaccttgaccgcgataccttagcccgcttggctgaatccgaaattcatcggaatgaagcagaggctgaatacatgcgtcgtatggctcttgatcaaaagcccgaccgtaaatggcagtatcgtgccggggttgcgttaacggcgacgagcgcagcagcaatgggcgctatcgctctcttctacctgaaacatacgggtctgtttgacggtttgttaggggaagcaaacctgatacaaatgaagaagctgcaagctaattgatccgaggtcctctgatatcagaggaccttgctttatattgttttttcttttgttgattttaactaatcttcaagatacgtgtgagtaggagatgacaatgcaatacacattaatgatttctgttttggtcgtacttagtatcattgttgtttatggcgcttttgcgcttctgaatagcatgcagacaaccctgcgggttacccaattacattctgatggagcgagtactatgacaacaccactcatcgatttgcatgaatatattacccacaagcctgctgaacgttttgtgtctcgtcctgatccaatcagtgacgaagataaaggctatatcaccgcaacagttcaacgcaccgtcgaacgtatgttacgtccagtggagcaacgcgctgaatggtcaaatgacttagatgttgcaacactgatgcctgcttggttgtctgttttaacacaacaggttactgcgtctcttgaacagagtaatcttcttcctggtcgattcattattcgttgggaaagagacggtgataaaattgttctctacgctgatgcggatgtagagaacatcggtaaagtacagttgcccattaataaggtaaaaccgcttgccgactattgggtataagtgaggtcgttatggatacttactattggtatattggtatcggtacgataatttttgttgctgcagcttttgtcgctggcttttatctcggtcgtgggtcacgagagttcatcgttattgatacaagcgataacggaacgacaacgggtatctctgagtgtttgattgaatcattacgtcagctacatcgtcgtggtcgtggggttccaatgaaccccggtaaaattcagcgtaagtttaatgaactgtacggtgcttggttacggttacctgaagacgcgcatctcgacctgcggatcgaacagtctaacaaaaattactatttccattttctcaaccactacacccataacaggataacaacgattgtccttcccatcggctggattaccgaggggattgacgatgtgcatattaaaacataagaaggatccttccgatgaacccattaaaacgcgcagtgagtattattcttaattttatcccaaactaccaacgtactgaaagataccgtcattggtataatttcgtttaccagcctgtggtagaaggacatattgctaatctcgagaaagtgggaggcgataagaaatacttgatggttacgattccggatattatccgcaagatatacgaagaccaggaagaatttcctaacgtcgctgatattctgttgtttatacaagcatatcgctttcgtcttacaccaccgaaatctgtagtacgtccgtggtttggaacaaaaacagatggcgtggaacaagcgatgaaacaacgttttaacgaccagttcgctcgccatactcctcgcgcgttacgggtgatgatggaaatcctcaatcgtgctgatttatgcgtcattccgatgatcattgaatcggaactgttttatttgttcgataaacgattcgaagttaccatcgttgagtacggcgatggccttttggtattcagttacgttgattgcgatggcgttggtgatgttcgttacgttgttctagacgtagaagaccgctcgtcaacgatgacggcggcgcagttacgtcgattcgttgcttacctcgaatggcgtgacgaggacgacgaagttcgccgtaagaaccatgttcgccagaagtacgcgagattatctgcatcttaaactgacggtcacggctctccttcattggagagcctgtgactatcattttttttttgcttgacagcataaccctcctccaacccaacagggaaggaggagggaatatgttaaggtgtcggattgataccggcgtcttgaagcaatttgataagttgcttttgggttgcaagtaaagccgttatctgcttctcttgcgtttcacaacgtgcgtatatggtatctcgctcttttatcgcggcctgacgacgggcttcgtttatctgatgttgttcctgagtaacggtatcatcgagagtgatttccatcgttttaacttcaggttcgacaccaagaatatcactggccttacctttcaatatcgttgttaaatacgaaaggtcaagaccgggaggaagaggcccgaaatcgatacccagaataatgcgacgataccgcaatgaatcgttctttgggtacgacgtgatatacgtatcaggtaccagtacgggtgcaccgtaatccggttgcaacgtgacgagataagcattcgcttcgagatgcgcttcgaatgtggatttgtctattgataacggttcgtacagttccgtaaatagatcgattccactaccgatgacttcgctgaatcttcgcaacgctgtaacggtatatagcgttgacgcaccaacggtaaacggcgctgatactgtgaataccccgaccgcaccgggacttggcgtcatgcgtgttacagccataatcaacctccaacaggcgtgtcggcttcatccggcattttcttcaggaacgcttcttttgttaagaagagatactgaacatcgttgtggcttttcgctaagaagctattgctaccacgcgtaacacgactataacccaacggtaccgggtcgtcttcggtcagcgattctgccagtttcagcatttcgtaagtgaacgtgatgaattcacgtgtcgcatcatcgatacggttaatatcgatgctggttgtgctgatgagcgcgtattgcggccaacgatcgtagaacttaagtttaccgtctcggttacgtgagttaccaacgcttaagaaaccgatcgagcgccacaacgtcggcaccgcttgaagcgatttacggacttcggcggtttcgccgtaaccatcagcaaagtttttcaggtaggtatccatcaacgaatcatcgaatataggactatagatacgtgcctgattggtcatttctggcgcactgtggcggttccagattggaatgaagatgtgttccgtcggaataaaaagatccggcagaacgatttcccagtctggacgtccgtgcgtgctattgctaagaatccagttttgcaggaactccttgatattatcaatgttgttacctgctgcaccgtagataatcaccgtccaatcggtattaatatatttcgaatcgtcggtgtaatcgtacgctttatatgttttcgtccacaattgtgtgtctgggaattggtcgcgcacctcgttgatttcttcggtcagtttctcgctgcttcgactgtcaaccagtttcttcaatgttgccagatcttcgaagaaggtatctaactgatccttaggaacagggggaacgacttcatattcgtattttggatattgactttggaatacgctatcagacaaccaaatcttgacgacatcgccggtggcggttatcttgaaactgatccacgccggtagatagacggtaccatcggtggtgggtgttgggatgtcgatagaatccagatacgttgtgaagtcgtcttttaggtagccgataacctggtctcggtcatcctggatttcgcctgatgaggctttttccagcaaccattgaccaacctgaagaatgcggcctgcggtgtcgtcattcagcgtttgtgcttcaccagcttcgttttcggcattcaacactaataaggtcgtacgtgcgtacgccgtgttggtatagatgccgatttcgcgactgaacgtagcactgtgctgactgaactcaccgaatttcgccgtggtttttgggtggttattagcgtaccctttgtacgtataaaaaccaaaaatactaatcattcgacgtcctcggttaagttgtattggaaatttcatactatcaaggacacacgcatgtttactacactcaaggcgttgccctggcttttcccttttcttcgcgagttgtttcggcgaagtaagcgaccgcccacacgctatcgtcgagatggagctcgacagtcctcgatattcttgattacgggctttttcatcgtattgggtatcgtgacgttattcgctggcgaaaaaatcattaccttgatggctgacgtgagtagtttacgtcaggaaaatgcaacattgcgttatgcgcgagacaccaaccgagaactgattcgtcaactttacacatcgaacgaagtacgaggccgtttaatcgacagtatggttgaacagaaccggattctccagggtgaggttgatcgagcgttacgaacttttgaaaaagagaaagttgacgagagggagtttcaagaacgcgttgaacgttttatcgatacctattacgtctgtaatagtctgacctccgccgaacaacgcaatcaatgcgtaattaacggtggaaaactgcggtcaatgaaagtcaatcgcgatcaaccgacgtcaaccgacggtaatcggtaataccgtacaactttgggctatcatacggacaatgattaatgaggtttacaatggcaggaaatactgagctcggtgccgttttctactgcgatggaggatcccgtccaacatcgagtgggtatggtggctatggcgtgcacggctacacctacgatatggtgaaagaaataaaaggcaccttggaaccttcaaaaagcgggaagcccaaaccaacgcaatacggttatgttgaccctaaactcgactttcctaaagacgctgtgctggtcgaacccaaggaatacgtggatgagttagaggctttgggtttcaatgtaacgaacaatcaggctgagttggatgccgcaatacgtgcgattgaacttggaaaagcaaagggggcaaaacggatccagctgttgtcggacagccaatatgttgttgtaggtgccaccaaccatcttgctaattggcgagagaacaactgggttaaatccgacaataaaccgttaatgaatgcggaacggtggcggaaactcgatagcgcgataagggatgcgaagcgcgacgctatcgatatttcgctgcgctatgttcctggacatgagggcaatgttggtaacgaacgtgcggatatgttggcaacgcgtggaacatatctatcacaaaaccaggactgggctgtaagaacccaaatacgccgcgaacttccggctaaggggtattggagccccgaaccggaaataagcccgttctttacgttctcacgctgctactttaccaccaaccagcagcaagagcgtgcgaaagatggccgctacatctatttcggtggtaacaccgataaagacaacaagggacgtcttgagttagggaaaaggattagcgatagtgcgtacagtgttatctatctaagcaagccggatgatgctgttgagattatgcgtacgcatgcatctcgggtattagagcatgggacaacggagtcagtgtatatcgcatacacggataaccttcatcatcgtcaatatcatcgcgatattcttgagggtgagtgcgatcttacgatgcgtccgacaggcctcggtaagagcgtgcatcttccgctaggtggatccaacacagccattttaatggaagcgtgcaacccgcctaaccttgcttggcgtgcgattgattccttgaacttcttaaagacgttactggatgaatggcttgacgctaaccgcgaatccacaccgcgtctagtcgtaaccgaaattaccgacgttcttttcgaaacagaaaaggataagaaaggcaaaacggttaccaaagtgcatagtgcgattacgcaggttacgaaaagcttgaaggtggacgtgaattacagactgacccccgataagcagggcgttacgtcttgtaccatgtccttggggttagacctgcctcaacgtctgaacttgagctatttagcatcaccggaaacgaaagcgtacgcggtaacatatcgcgagtctgatgttgcgtttcgtttcgctgtgattattgagtcgggagacgacgttggtatatgggctaacatatacagtaacccacgttatgtgttggagtaatcaatggtgatggtcgaacaggtagaacgtgagaaacaaccgttgaaacacgctctcctatcgttcctcttaaccgcaaaagctaaacgcatacttctcttcggaagtttgtatggtaccctgcaccagcatgacgataattacatcatgctaaaaggtcttgcggatatgaatgagcgattggagatagctgagtcggtttcagcgttgatgtttgctgcgcgacttggtattactgcatggaaagatctggatagtgagacgttacttaatgagacgacgaactacgatgaagccgtgcagtgcataatgcaacgcgttccgccatggctttattatgatgataaagcaacgattcgtcaggagattaaaaagcttctggtaagagtctgcgttcctacgacacaacgagtggtacaactatacggcaaataaaccttatcccaccctaccgcccttaacggggtagtagggtgggttattatgttattttttcgcgttctttttaacggcgtcccaagtgtcgttatatgcgatgatcgcctcagccaaagcgttcacgagaaacgcatacagttcagcctgcttggctgtttggtagatagcgtcactaatatcgcgaatcatcgcgttgctcaccgcaccttcattgtagtcttgaaccaggatttcggttaaacggtcagctacctccatgaaacgttcgattgccttcttcacgtctttaggattaacgtcaagcgcacggatacgggaagcatccagatcttttccgatctgacgaatatcatcttcgttcttatatgcacggcctacagtggtctgtgttaccgtcccttgtttgaacatcgcacgtaacgtctctagaacgttctctggatcgtttttaggtagcgtttgagccataccactactacgacggaagttaacgtcgttgacggctttagcgcacgttacggtcaacttatccaaatcaggtaggatggtgccaatcacgctatccaggctctgagttaaagcaacaacataatctgacatcggcgcatttaaaccattcggaataaaagcacgatacccaatgagatcgctgtaagcgttgttgctaaaaatcgtatcgaggtcatcgaaaactttaggataaaccgtcacatcacgtttcttaagccaatcggtaacaaacttcttaccgttggtaaacatactgcgaagattcgttactgcggtaagtgaagcgaagtcttgcgcaaagccttccattgataaagcacgatgtgaatcccaaagggtctgcagtgtaatcgggtcttcaggaatggtaaatttatgcatgattgtcctcgtggaaatagcggttgtcagtcttaactaaaaatagttattctctgaacactaagaattagtcgaagaatcgaaggagtctttacccaatgaatcttaataagtacctttctcctggtgaagagatgcgttttaatctcaacattggttgcttaatggatattcccacatctggtggtcggtactatgtcggtaaacacggtgaaagcatttgtaacggcggcatgatgcttgttgagggcgcaggcgctcgcggcaacatgaacaaaaccacgttcataatgtttcgcttgttacgcgttatcgatcgttacgcaaacagcaatagtagcgtttacgacacagaaatgtcgttaacgacaacacgtatcttaacgcttgcgatgaacatgtctaatatcgcaggtgtcgatcttttcgaagaagaacgtgtgtttatcaccgatgctgttcagatgagcggtaacatttggtttgatgcgattaagaaattccgtgacgacaaggtcaaagataaatctcaacgcaaagccgttccgtttattaataaacacggtgagaactatacctggtggttgccgaccgttgtactcatcgacagtttctctggattaccaatcgatgccgttgatgcactgttcgataaagaaaccgcgggtggcgcaaaactgaatgctgaagcgatgcgttcagcagctgcgaaaagccagattctatcacagatgccagtactcacagcgtcggcgggtatctacattaccatgaccgcccaccttggtgacggtgtaaacgttggtggtatgccgggacagcaaccggtacgaaaactgaaagggtttaagggcgatgagaagtttaagaacgtcccggaacgcttcacgttttatacgaataacctctggaaaatcgataaactgacgattcttcagaacgcggataaacgcgtcctttatccgcgtgggcctggtgacaaccttatcggggataccgatctgcagttgattcaagtctttaacatgcgcgctaaaaacggacccaccggcttaccgttcccgattgtggttagtcagagcgaaggggttaaaccatcattaacggaataccactacctgcgtgataaagattggatgcgtggttggggtatgcatgcgtcaggtggtaagtcagctgatggtgcttcaacggtatatttggatatttatccggatgttgcgttgcagcgtacgaccattcgttctctctgcgaagaggatgagtatttacagcgtgctctggaaattacgtcggagctgtgtcaaatgcataatctctggcgtcaagaggtttacgaaaacccacagctgtattgcaccccacaggaactgtacgacgatcttaaagcaaaaggtttcgattgggatgtattgttaaacacgcgtggttactggacgtatctggacgatcctaacccgctgccgttcctgtccacaatggacttattgcgtatgcgtactggtgagtacttcccgtactggatggatgaaaagacaaagcaaccaaagaacccggtacccgcattgaatcgtccgagtaaaaaataaaaggctaaataaatgaccgcacctgctatcaagcatgcacatgaactgattgatgttatcacgcagacaattgcgtcacatcaaccagcgattgctgagcaatttaaacacgacctattggctcgtgttcctgagtacatgacattagaacatacccaagctgaaatcaatcgctattggcgactacagtttggtgtattagaagtaagtacgttttcggtacgtgagtgcttactagacaaccaacccattaaaggatggatccataatttccgtgattacgttgcaccctttatcgcacgcaacgtaaagtcattgcgcggtggaagataagcgaaccctatcgtgtaggggtatcgggatcacgctactgggatgattatcccttgttcgaaaagcgtatgaaccagatgttacacaaccttcctcacgacaaagttcatctcattgctggcggtgcgcattcaggcgctgatttgcatgtgcgccgctacgcgaaggattacgggtttaaatacaccacgtttcctgccgattgggatggtccttatcgtaaaggtgctggattcagacgcaatgagtggatgggcgatgtcattacgcatttaattgcgttctgggatttcaaaagtcctggaacaaaacacatgatcgacatcgccaaccgcgaggacaagaacatcattgtccaggtgtttcgggtatttccgcaacagacacgacaataggagacgtttatgtccaaccgcgctgcagcagaaaaattcattcttgggtatatcaaagacctggtgggtgaatcgagcccgacttacgctatttacaaaaaacgttttgctgaaatcgatgatgagacgtttgatgcctatatgcgtttatgtcgggataagaaagagattctacccatctgggtacccaacatgaacaaaaacgaggtgacgataaaacgtgcgttggaagtcggtaagaaatacggtttccctttcttccaacgcatttatctcaccgaccagaaaacagggcaattggtgcttcgtgaccgcccaaccagattgtacctgattccaaaccgccgacaagccgaaacgttgagtgctaaaatttcgattccgaaaaacaacaacaccaaggaccagctcaccaatcagccgacgggtgatagtaaaggttccacttggagccagccggaaatgcaagcgacgttaggacggtcgatgccgaacgtgaaccgagagctgatacaggctcgtggtggtgacgataagaagttcaacgcgatgaaccgcatgctgttagaaacaggtaccgtaagcttggagcagctccctgaagacagcaaggcaaaatcggtttcggcggttggcgttatcctcaccgcgatgcatctccagaataaccttgatgagggctaattatgttacgtggtcggttatcacgacgtatcgcagaaataaaacgatcgttctccccagagagtgatactgcgttcgagcttttattagaagagcttgcttccgatcgttacgtgcttgttttagatgcggcgatgcgaaaggaagttatcgcgtacacgaaacgctgggtgtatttgtattccccaccgcaacaatattccaaaggggcaacaattcgtgactgggttacgaaattcagtgtgacgttcatccatgatttgtttatccctgaaaacatgatccgtctttggcgtgaactccgttctgaggaaaccccttcgttaatgggttttacgatggacctcacaacgcatgttcgccgtacagtgttctcaactgtcgatgacatcgatatgcttatcgatcatcttgctggaagttttgcatggatccatgaaagcaatcataaactggtggatggtatcgcccgggatttattcgcggtagacgaacagttctttacggaattacccaccattgatgatattcgggatatgcttcgtgcgaatacctggattattccgttgctttatttgcataccgtcaccgttgaagaattggaagaaatcggtgagttggtattcaaacaaacaaaagagtacgagaagaaaattaaaacgtctcccgatatgcagatgttaaccggtgaagctggagagcaacgatgactggaaatgcggcgttagtgacggtgtacgtagaactcgaggcgctgcttgatatcgaaatggcggtagcaacaacgttggatcctgaggctatcagaaagtgggggaagaaatggcattaccgaccctataacctggagccggaaaagcaggcgggtgttacttacacttacgaagagtttaagggtgcgttggcaaatatcgatgaaaccattcttgataaatgtattccgacggagttgatgtggcgattatgttacgtggttgcggactacatgaaagaccgcttgacagggattgccgcaccggatttttcggttcatgtgaatacgtacccgtttgaatttgtgggagatgctgcaattgcgttaaaagaaggcatccagcaatacctcggcgcgcaagatagcgttgagattatttaccgtcatccggccacactgcatccgtcagaaatccgtaagacgtataatgcgatgttcttttacgatttcaaacgctggcacctccccaatcagatgctgttagaagacaatccgatttgtaacgtattggttgtagccagacgaatcagtgaaaccatccctgattccgatctggcttatgacaaactttacgaagcaatcgaactttctaacgcgcctgtgatgttcatgcggttctttggaataaaatggttcagttattttattcctcctcgtgtgacgcctccgaagactgatgatctgcagccatcttctgagatacctcctcacgaaccgacgccgtcagttgagccattctagcatagaaagcatcgctggtttcttcgacacgtccctggatgagaacgcctggtgagaactccttgctatcgaactcttccaatgacgcaaaaccaagtcgacgatcacgttcttcaggcgtgactggcttcacgacttcgccttcataaacagcccctgctgcgagaggatgttgatccatctgacctaagcggcgcagcatggtttcggttagggcttgtgctgttttcagtgcgctgtcattcatggcctggtcggcactgatacgtttcaacgttaagtcgactttgtcgttatcgcccaacgatttcaacaacagcttacctattcggtcgacgttttcgacgtcgacgatggctttgttatcagcgccaggattaagctcgaaatctttgaattcgctatctaacagcatttcaaggcgttgaataaatcgttggcggatattacgggtttcgtcaagacggacctcgaatttatcaggtgcttcttgcggttcatcatctacgggggcaacaccatattcgctcattttacattctccgtattgaaaaaaataacaggactatattaccttcatgatgacagtcatgaaggcgacgtataacgttaccttcttgtgatggcttcattgatgcctgcaagaatgatacataggtgatgccatgttacatcgctttttcttgaggcgtgcgttccaacgttataaaaggaagacgtttcaagatgataggcaacggttaaacgaactcttgttgctttacaaaacaacgtcctgggttcacaacatctacgatatacgcgttgcacgtaaaacgtatttaccgttgtggtatatggacgctgagtcgttgatgcttgaccttcgccgttggcatcaagcgttcgataacgaaggcaacataaacataatcgcattagaggagagaacatatgcaatactagcaccacaaatcacgttcaatcgttggcttgctgatgccgatggccgtgttatccggttcgacgttctcatgcgtgacgttatcgagtatggacgcatacttgcgacgtggttagacgcgctggcggaacgtgacgatttggatgcggcttatggattacgcaaaacaaggaaactagcgagagactgttgcgaactcctaaccttcgcactcagtcagtacactggtgtattatgacaaataaatataatgaagtctctttccgcgcacgcattaatccgcttaagcgtcgtgatgaaagcgatgatgaaaatcctcaaagcaatcgaggacgagcgactaactacaatcacggtaacaatttctggacgcctacgggtagacaggatttccttacggagttcctgttgcagatttatacggagagagggatcggcgcaaatcagctcaattcgtatattacccgacatatgcgtgatgtgaagaaacgacaccctgataaaacgaataaagacatttccagtattcggggaaacgtcattaaggagttgaatcggggatcgatgccgttccgtaacttcatgaataaactacgcttaattcgtgcaagggaagtcacgtttacgatttccatcacagatagcgtaggatatacaaccacgcatacgaaacggtattttgatgcaacaattcctgttgacgatccagatgctgaatcattaggttcagaaaacgaagaagtttaacatcgatgttgatcttagcctacccaccattgtgtgggtaggctttatgccgtatttcttttttctttttcaggaggacgtgatgagtctttacgacaaactgccgagtatagatacgtccaagatcaaaaccatcaccagtgacttttcgacagggcgtgatacgctccttaaagcggttagcggtaccgctgtttcagcggcggatgcattaaccagttttcgtagcagtattacgaacagtatcaatagtacattatcggcgttaacaggaaacctgatttccataagcgatcttaattctttcatcgatatcagcggaggcaaaatctccctgaatgaaaacgcgttgatgaataagatcaaagatgttactggcctgaatatatcgtcaaccgataacattctatcgcaagtaaaagaccagatttacagtaccattaaccagcaatccaatggtgcgttagggaagcttattgataaagatggaaacgttaagcttctcgatagtctgatgtcgggcgatgagtattataaactttcaacgaatgtcgatcggtatctcgacgatcaagggaaaacgcgaaccgaattcagttacaacgactataagacgaaccggacagttgtcacatcgttgattcgtcaagccgcattagcaggcaactacatcgatgtgcgtagtctgtatgactctgggtcagcggaggataaagtggcgatggcgaccactttagcggaatcgttaagcagcgttggtcttaacggcgatttccgtacagctgctgtgatcaccgaacttatcacggctgaacgtgcccgtagcgttgtccctgaactcattacgttactgtttcgtaactaccgcattccatcgtacattacccttaaagaatacgacgctgaagcctcgcgtttaattgattttgccgatgcgtttaaacctggatggggtaaaacgaactatcacggtaacgatgcagaactcctcacgatgtggatggaaacatccagtgggttctattctcttttctctcgcagtaggaaatacgcatctcttgctgcgatgggtaagaattatacaactaccaccacgatggcaggcttgaagaaactttatcctgatttaccgacggtgacgttaggttaacataatccctctcccaacccagcagggaagggagagggggtttatgcagtgaatatcagaacggccgttctgtacgtttccataacagccctgatgctatcctgccaggcatggtgtcagacaaccagctagcaaaattacctttgctccagaaactatcgatatcagccatggttttatgcatgcgacgacttaaatccggaataatgtaaacttgttccgtaagtgtcaatgctgataatacagcaagatagttgttgagcggcgtatcgtcagcaagaagatcgcttaagaagccacgaggatccaattttgcgatcgatgcggccgtcgttgtgatcggcatggcgacgatagacgacaggtcataaacgctgaagctgacgtcgatccccaacggtaatcgctcgcgtgttgatggtacgtttccaacatggcgcgtcacagtgatattatcgataaggcccattttaatctggactttacctggaatataacactcacacatgaacggcatcccgtaggacgatttaccggtagcctgaggtaaaccacctgcaaggatcgctaaaagaggtaccatgaggttcgtaaagatcgaccagcggtccccgctccaggaacgcaattccatcgtcagatctgcacgcggaagacttaccgatgatccggaatagaatttcggaatgtcggcgaagccggaacccatgaaggcaccaaaaataccatccaggcccatcccggaaatagcaccattaacgagatcggaaccggctttgatggcttcgtctagtacagcccaacctgtattaccaccggagagggtgaaacgacgttcgatgttcgcttgtgcacggctattcatcgtctgtgcgattgaactttctgaagcgctgtttgaaaacgtttcggttacactggtgacagagtcgactcgaaaactgataaactgagcaccatcggccagttcagcatccatcagatcaagaaacgtagcttcttcggctgcgttcgtttgaccgattcctttgctctgtacgttcgcgcctccagccgttgatgctgttgttgaagcctgcgttgtccctgacgtcgaattaccgacattggctgttgtaccctgactctgtgttgacgtaccaccgtcggaggtagccgccgagactttgaagttggcatcagcatccttgttggtgtatgaggcccttccgaataaaaggtcgtccatcgtttgtttattatcaccagctgtcgcactgtaaacagcagacttctgcgtatcggcgagatactgcgttagcgtacggccggttacatccgatggaaacgctccgctatcaagtcgtttatcaagatcgttccagaactcctcgtaagacgagtaatcgttttccatcatggattgaatacgacgtacccatgcgttctgtatgcgctgacgtcgtgttgcgatctggtagatatcgatcccaccacctttcttataaatccccggtagcgtcttagaggcgtagttgatgaattcttcaacgttctgaccaccgattgaatattggtggagtacggtacccccttcttccacatagcctttatctttaccggcaccggcgataagacccatgtttatcgctgtttggtttaccagcgtttggaaagacgcccaatacacgtgcatggttggtacttgatagtaatattgactggtaggcttacccaggaaatatcgaccgatacgtccaaccatatacaagtagggtagaggtgtgaggtaagaaagaacggtggtatacgctttggctgcgtaataaagaataccgggatcgcgaccggttttaaccgttacggcaacatcggcatcgtagaaatcagtaaagaagatacttgcgcctgtaaagcgaggtttaccgaatcgtaacgtaacgacctctttaaagctgttaatgctttcactatagcctcggcccatgcccgttgatccaggcataaccgcacgtcggcgttccttgatgtcggcaaatttggtatattgcggtggtgggttaagcacccagttcccgcctaaggtggtatcatcgacgttatcgtaggaatacggtgtatgtctcgctttaatcatgtcagcactaagcgtgctgctatcgcccggtaataaaaacgcctgtttggtgattagggcgttttgaacaagaatacccatgtaacattcctcaagaagagggcgggagattcccgcccttaactaatgactactgcgcgtaccttgtccgtgttggagagattccttgcggacgattaggtagcgacatcgcctgttgttgagaaggacttgcagaacccttaccgatagaagaacccttaacggcttggattaattccgaaataagttcattcgttctaccggtgttcttctcgatgttctgctgcgtggtcagctgctgtcggagaatttcacctgcgctaccgtagaagttctcactcgcggccgatgtttgtgtcgcagactgcgcgacctgtgcaggcgtattcggaaccgatatccctcgatttgcgccagggtttgacggcaaatcgctaagtgctggcgttgatgtcggttgtcctgccgcagctttcgctgtttcgaaacttccaggcgctggtgatgcttctccgggtgctggagccgtaccggcagccgcagacggtttagcttcaggggtggttgaaggtgctggggcttgcggatcgttgcttacagttggcgttccgtttgcctcttgggctgcttcattcttcacctgctcggcggtagtcggtccttcagcttgatcgcctgatgttgatcccgataactcatccatcattttcttcagggtgccattcttagccgcctgaatccaataagcagagcgctgttcaacgtcacgtaatccattatagccaccgttaaccagataacgaacttggcgcacatcaccccgtttcgcaggatcgcgtaacacattgcctcggttgagccaccacgcgacactaccttccgccgcaccttccggcgtttccaggtatgatggatcgctgacaagatctttattcaaggtcttggacagacgagcgtagttagctttaccggtaacctgaatgaagccacgtcctaaatacttcgccccgtctcctttctgcgtgttccctaagtctttacgattaccgtacacgcgttcgaacaccgcttccggccccatgctaatcgtctgcgctgcatcctgcacatcacggaatttgtaagggaagacctgtttaagacgctctggtgtcttatagttcccctcacgtacgtgagtgtagttccccgattcatgttcgatgtttgcaaggaacatcgccatttccattggatcggtaataccgcgtttcacagcggatttaacaagcgcacgacgtccagcttcgggacctggccccgttgcaggtttctgtaagcccatgttaggcaatccggtaagatcgccggttgaccccaatcccgcactggaagtagctgaagcagtaaagctgcttgcaccgaccttattcccattggggttgtaattcgcttcggagttactcatcccgccggtaatgcgagatttcttctgccagacaccgtctttcttctcgtacccagcctgcttcatcatcagctcttggatcttcgataatttatcggtatcctcttgcgatgcttccgcgttcttctcacgaaccttctctttatccgcatattcttttaacagatcgagctgactctttgttgaactgctggtggtgttagcttcagtaccggagaaaccacaactgttccacgaccatacgggctgcagtgtacctttctcatcacggtattgcgctgcgacaagttcttcaccgatttcccaacgttggctgtctttcaggttctgtaccacgtcggacagaagtccttgaccgcccatgtcgctaacttgttggtaataggttaaaaagacgggcaggaaacggttgttcatccaagcaaaccagatatcctgatcatgcttgctgttaacgtctcttccgaacttcgtcgcgaatttcttgtagagcgcgacaagatcgccaccgtatttaacacctttaccttcagcgacaacgccaggttctacagcgtcttcaagttccatcagcacttttatctgacttaacaacggaaccttaataccgtacgcacgaacacgaagactggtgagttcatcgatgtatccaccggcaacccatttcctaccacggcggtctacgctttcaataaccgcggttgcatccagtttctgtcgtcctttagcaccagcgctgttgtaacgtttatcgttaaaacgtaatgacgctttctgaccacgtaatgcgttaggcgcaacggatttacgttgtgtgtcagacatccgtgaccaatcagcaatagcctcatcatgagtgtattgcttaatctgattctggtactctttcttgatggcttcgagctgtttcagcatcaaggttttgacgtcttgaccagcaatataacgcgtcgcaccagaagaacccaacgggttagcttcgacgtaatacggaccatcaggactatcggaaggccagataaacgcttccgaccatttcactttgttctcaccgttcggatatttatccatttccatgtatttcttctcgtccggcatatgctctttccagagtttgtacgcacgagcgaaaacaggaataaaacgatgcagataccagcgtttccattcgttcattcggtcggaatcttccagagacaattcccagatttcgagaatcttttcagaatcggctttcggatcgaatccgatggtatccccggtcatgaccacatggtcggtgaggtatgtttctgtcgcaagcagcttcttattgaagtctttatcatccccttttgcaccgtatgcaataagacggagcttctgcatcgggtcaggcttctcggcgaaatgctgatagatcttccatccagcataagcagccaacgcaccgccagcgatagcaagcccaacaggtgagatgaggaatgcacctaatcccgataacccaccaacggcgttcaacgcggccccacccgccattaacgcaccacgtcctaaccatcctgccgcacttagtcctcccttgaccagcgcgccggttcctctaatgagacctttgcccaacaacccagttaacgacgcaccgccgcttaacaccgccccaagaccacccagaatttttccaagcggactcgccatgagacgtttacctattgcggtatcaccgagcatatcgaaaaggcttccgagtaaccctcgtttcttctccttttcttctcctttattggaatctttgccgatgtcatccttaccgttttccttggcttcacgcttacgtttcaggtcttccaacgatccttctcgaacaccatcgccattccaatcgcggtaatccttatcacctcccggcatacgctggtcaagaagctggtaaatagcatcgaggcgatctaccatgctcgacgttgttcccaccagtaatgcgtcgggtgattggaaatttaatcccatccgccgtagaccgttaacggttttacctggaagggctttaaggatgtcctttgtcttacgtagcaacgttaacggtaacgtaaaagcttttacaccgaagttgatgagtttttcttttaaacgacgaatcgctttaccgtatttatcgacaagtcctttctgcatgtcggcaagcgtaagtacgacgttaccttgtgcatcaacaacatcaccatcgatgtcttcaagatttttgatgacttgtccatccgagcgacggaaatacccacccgctgctaacaccatggacaacagacgaggcgttgattctcccttgacgtaaacgtcgggtgttttgtcaagctgtttgtagatctcaaccgcaccgcgttttaacatccgtgggagacttaatgccgtcgttattccattaagaccttcacgtgcccatgctttaagtcctgaattctcaaaggcacgaccagcgcgagtgaccaaccctttctcgatatcctcgttgctgattacgatgtttccatccgcatcaacgagtgggcctttgatatccttcatccgttttacggcttttcctgtcgcttcgtcgaagtataacccctgacgaagtttggcagccagtatgcgtggttgggattcccctttaacgtaaatgtcaaacggaacctgatcaaccttggataatgcgccgaacacgaagcggttgaaattgataatgcgtcggccagaatttaccaaactacccaacgtgcgttctgcaccccagcgtgcgcctttaacacctaaacgtgcggtatttttaattcctttccagaggagattgcggccgcctttaaacaggttgcgtccgccgagtttttgtttggcacgatcgataaatgaaatgggtgctgtaccttcaggtacatcttcaccatccagcgaaacgttattagaccagtctttctcagaaatggctttcagcagcgcaagcatttcaacacgttgttcggatgcttcggacaacgcctcgagataaagctcttgccacgctcgattctgttcttcaagcgatgtggtgataacacctgtgtcgttccaccatttatcgtagccgatgttttcatcaacggttactgttccagcagccttacgaccgatgttcggcaggccgacattttggacgtcaccagctgatggttttgcgtcacgataacccagcgccagcgctcttgtttcctgagcggttaatcgcgtattgacatcgccgcggtcagcgtactccggtcggtcgatgtattgatcgatttcagagaaataccgatcgtgattaaccgagtagcttccgtcgctatttctcgttacaatcccaatccgttccagatattggacgtcaccagtacgtttcagcaggttaaggttacgctggatatccggttgtaaagatttcagatgaccgtaacgaagatcggctcggttacgttccgtgtaatattgcccgcggtttccaatgacctgatgacgttcgcccttatcgttgacatcatcacgaataccgtaacggtcacgaaagtacgtggaaagttccttaatagcgtcgcggtcaatactacgatcgaagttgctttcatccgtaaaacgagccgggtcgaatgcgatgttcgcgtcgctatctcgcgccaactgcttggccagcgcctttctggctttttccgataattgcttatcgggatcgatgaccgagataacctcgttgaaacggctggcgtaataaccaaatgtacgtttgttaaacagcgtgtcattgacgctttgttcacgcgtgcgctgagacacgaattgtccgctgatgccgtcatagacctcgtagtcaggatcgctgtttccggtgcggataccttcactgcttttcagaatgcgtgcaagaaaaccaggaataacttcattgatactgcggtaagttaaaccgtcgaaagatgtttgctccgccagtgtttcagcggtgtcgttcatcacgcggaagttacgtccgctgtccatgttgaacgcccaacgccctgcaccgcgtaacaattgcttgtaaaacggatcgctaagattgaattcgtttttacgaatatcttcctggagcagtttaccgagattacgcgtcgtgtaagcggcagcctcaccaccttgatccacggcttttaacgcgctagcgaatttagcattggggtgacgttttgctaaatcgcgtaacgccatcctgcctttattagccatccacggcgcgacagttgagccaatgaactgacccaacatctttccttgcatttccttaatatcgccttctgaccccatcccgtccatcatggacaacgagtcacgcgcttcgtttaaaccgtataacgcatcgtttgcgccggacacgacaccttttaaagcgcctaatgcgttggtggcaaggttcttcttaacatcggcaaagaaacggttctcgaaagaactcatcgcatctaacgcattaccaaagaaacgttggtacgcgctacggcggaattcttccgacatttttgctttagccgcatcaggtaaagccgtattcttctggatgttttgtaataaaccgatatagacttcggctaactttttatgctgatcaaaacttgcacgttgaatcgctaaggaacgatatttcagttccaggcttttacgcatgtagcgtgcagcgaattcgttgttgaaaccaaccatcttggcgacgccttcttgcatcgcgctcatttgtttgttggttacagcgtaccgtttgtcagcgatatcgtcacggatactctctttcgcttgctgttcagcgaactgatccgcgctttggtttgctgattcgcctaatgcctcggcaaccttgcgggcgatctcatcgtcccccgcgctcgccatgcgttgacgaagggtttcttcagcttgtttacgttcgtcttcttccttggcttctcgctcccattgctcaagaattttcttcgagaaatcgggcatgctcgcacggtatttcttggtcagttgtgcggctaaccgttttgagctttggaccttaggaagaacgtcacgaacggcttcattgtatagttccttcgtggatccgacggcggaatcaataagatccataccgtcgctgtagcccttaggcaatgcgtttctggcgatctccttcattctttcgtaggaagtaagatcctcagcagcacctttaaccgctcctatcgcaaagcgtgttatcggtttacgatcgtctttgggttcgttaaaatcgagatccagggagaagtcttcatcccagttgtcccaattatcatcaccctcaacacgggttttatctaccatgtatacctccagttcgatacgttcccatgttacgttggaacgtgatgcacgaagtttaccttcggcattgataatgttgaagcgtaacttcacacatcgcccacctgataaaatcaggcaggtacgtaacctaataacttcctcgcctcaagcaaggaagcgatgggtgacgccatcacccattacgtctctcgtgtgttcagatgataccgccgcagccggtggtggtaaagaggagtgtctccatggctaaagtcagagagccgtttaatattagtattttacacctcgataaacagcagttacgttttctccccaagatcacgagcatgagcattcgtgacccaagcaccggtaatttccacgatgatggtttctattcttacaccatctttggtagtgcgggtagtgaagatcgagaccgtcgatttgcggtgattgaatgcaaggttgaaatcctgcatcctgtcatttacgaccgtctcattcgattaaaacacctctatggcgatatcatgtcggggaaggcgtacgctcggtgggatcccgaacaacgcgacttcgttgcgtctgatgcattaacaggacaaacaggatacgggttctttgcacaacacgtcgcggatatcaagttcgtttcaacgggttcagctcaacgagagctacgaattaaagttgtcgaagagaacatgttcaaagcgatgacccgtcacttactggtattgcctgcaggcttacgtgaaatagaagtaaaagaaggtgggtatgaaagcgagcaagaaatcacggagttgtatcgtcgtttccttgcaatttctaacaccgtccctgatggattaaaagattattccgatcccgtttacgacggccagcgctggagcttacagagaacattcaacgatatctacgctttactgttggatatgttccagggtaagaaagggatcttccaaggtaagtttggttcacgtcgcgtttggaactcaacccgtaacgttatttcggcaattaaccccacaacggaggtattagggtcgcctaaccagccttcctgtaccgcggttcagttagggttataccagatgagtaaagccgctctcccagtaacgcaacatgcgttacgtaccggtattttgcaggaaatatttgtccgtgatgttacagaagttgaacttattgataccgaaacgatggaacgtgagcgcgtcacgcttgatccagacaccatcgatgactttacaacatgggacggaatagaacgtttactgaacaccttaagcgatcctggcgtgcgtaacgagcctatcatggtcaatggacgatatctttgcctcgtctatgtgaacaacgattcgtttcggttattccgtgacatgagtgaattacccccggagatgttgaataaacctggcgcggatgttcaccccattacttacaccgagcttatctatattgccggatataagtactggaataacctggctgcgatggtaacacgttatccggtatcaggtatgcaatccgttatcccgttaacctgttacgcacgtacaaccgtcgccgcaaaaccgaaaaccgaactggatagtaactgggaaccaataacggatgaacgatttatcgcatgggaataccccgactggttacctaatgcttcgttcgtagaaacgactattgtccctgcgccatacctcgccggacttggtggggactttgatggtgatacggtctcggttaacgttctttattccatggaagctattgacgaaattaccaactcgcacaagaagcgagctttctgggtaagtggtaaaaataaattcaacatcgatattggttacgatacggttgcgttcctattacgcaacttaacgggacctcgtggagcctaacccatggcaaaacttaaataccttgattactaccgacagtttggcgtcagacgataccaagagctattgtcaccgagattacgtttagtgcagctattgcagctgccacgttatgctgtctatcattacaccgcaacggatccttcattgataggtcctccagaaaacgaatacatgttgagtaaagaaagtgctcaactatggatttcgtttgctgatgatctcgcaaccaaacagggtgcacctcgacgtgatcagcgattccagctcccacgagcgaaattggattatcgtgcgtcacatcgtcgttttcgtttggttaccgatctaagtacggtggagaaaaacatcaacgctcagatcgttgctaactacgcacatcttaaccacatgtacatctatcgtccaacgctcacccgttggtatgatgaatggttcaacgtacgtaaaacaatttggtcgaaagccaacgaaatcgcgcagcaaagcgatcgccaacactttttgttgttccgtataccgtcaacattgccgaagatttcgttgatgcgtaccacgcaacaggcaccgacccgtaacaacctcatgaatttcgccacgccggaggagctgtcgttctttgacttcttccgctggttgggaaccgatcgtgagaacagcacaatggcttcgttagacagagccacgctggataagcttaacgttgtatttacagacggtgtgtacttctttacgctgaatctcggcctgttggaagaatggcgtaccgggcttgtaaaggaaggggaagaactcgataaaacgacactcgaaaccttccagcgtcgttggatgatggcggtaacacgtctatggtcgcagagcgcgaatgaagaagaacagaaacaagaagaggaacaggttcttcgtcaagagcaagatattcttgcggacagcccggatgcagagtacgatgatcgcgacgtcgtgcttcctaacggtgaggatctggccactgttcttgatcccgatgagttagaagcggagttggttggtgggtcggatgaagacgatgacgctgatgcgtggaacgccattgtagaacgctcgttcgaagatgtccgtgaagtacccggggtagaagtacaaccagatttccaacccgatgaagatcaggacattaccgacgatctcttcgaagtcgttaccgacgataccgaagaagaaaaggttgatgtctttgacgcggcaacgttaccaaaaacgcacggtgaatatattcagtcgttatcggatgcggtgttggtacgcgcgagcgatctggctgatgcgggtcagttaagcggcgtccaatataaagcagcgatgcgtaatgctgacgccatccatgaaatcgaagcacccgacggttctggattaacacttgctgagtatgttgaagttaaaccaaaagccgcgaaattagcgccagcaaaggttatgccggaagcggatgttatcgtcgataagagcctatgtaaatcgacgcttgcggtgtgggataaacattacgttgaacacgtgatgcaaaaggacatcgcagccgctgttgttgccgtacaacaggcaggttaccctgtcacgggatataaagttgaagatgttgttgacgtgatgggggattatcaagtcatcacgattaaactggcccctgtaggcggtgtcccaaccacgttcccggtgatgttgccgaaggttcgtaaggacggcatttatgtcgttaacggcatcaaataccggatgcgtaaacaacgtgttgataaacctattagaaaggtatcatcatccgaagttgcgttgagtaccgcctacggtaaggtgtttgttaaacgttcagagcgtgtcgttaataacgccggtcgttggttaacacgccaacttacagcgatgtattacgataagtcctcacccttaaccacgttaaaacgtggtaacgtctttgatccggccgtcaaagtcccgtattacttcgctgtgcttgcacgcaactatacccaaatccaatttgctgattgggatatacgtctcgatataaaaacgctaccggagttcatcggggaagatcggttcaacgaacagttagccgaagggctcctgacgtttgcgcgtaacacgctgggtgaattcttagcaatcgataaacgcaatcagctctatatctgtcagtcaggacaaacaccaacacctgtagggacgttccctgatttcttcggtatcaatgcggctaagatgccgatcgaagccgccgatcttgaattcatgggtgtacgtattccggttggtgtcgttctaagttatctgggtggacttaccccgttattagaacatcttaaagcgaactatcgtacggtacctcgcggttctcgtatgggattagcacccgatgaattcgcggtgagctttgatgacgaaagtttgatcttcagtaaagacgatcgcatgacgacgttgttgctgggtgggtttaacgaataccgtaactacatcggttacgctcgcggtgctttcgacaatcgagatatctattttaacgttgttgatggtgctggacttaaggttcgccatttacgcgaacttgaactcatggagcgtcttttcgttgatccggtaagccgtacgttgctacagaacatgggagaacctaccgatttcgccatgttgttactgcgtgctgttgaactgcttctggatgactgggcacctaacaccaacgatgcgaactaccaacgttttaaaacgtacgataagttcgctgaattggtgtataaggatctggttggcgctattcgtcagaatgagaacagcagtcaaggaaatcgccagaaaatctcaatcagtccggtaagcgtctggaaccaaattctcgacgacagcgcgtccatcgtgatcgatgaaaccaacccgatgctggatatcaagcagggtgaagaagcaacgatgaccggtatcgggggtcgttcaaagacatcgcttcgacgcgcacgtgatcgtgaatacgacaagtccgatgttggtattgtgtcagagggtacgaaagatagtggggatgtgggtatctcagcttaccttgcacctaatgctaatatcgtgtcggtgtatggtgaaacacgaccattcgatgaaaagacagacggtatctcatcggtaatgagtacgtcggcgttagctgttccagccgtagaccgtgatgatggaaaacgtctggtcttcgtcgggatccaacacaaccgcatgattgccgctgagggttacgatgtacaaccgtggcgcaccggcggtgagaccgttatcgcgcatcgtgttggtaagctcttcgcagcagctgcccaaggcgatggtgttgttaagaaggtcaccaaaactgcgcttacgatacaatacgacgatccagagttaggagaagaggttttccaactcggcacgataatcgggaaaggaccaggtaagtattatcctcacgatctcattaccgattataaagtcggggatcgcgttaaggatcaggatgtggtggtcttccatcgtctttattttaaacgcgattggtggaacccaggtcaggttgtttggcgcgcaggtgttctgtctcttgtcggtattctggatattccagagactcacgaggacagttcgtatatcttcgacaatcttgccgatcgtctcgtaacaccatcgattaagagccgtacgctcatcgttgacgcccatctcaacattcgtggtctcgtgaaaatcggcgatcatgttgaaccacgaacgatccttgcaacactggaagaaccgattgcgaccgatctgaatgatgagagtcaggaagccgttgaagcattacgtcgtatgagtcagtataacccacgtgctgacgttcatggtgaagttgtacagatcgatgtgctgtaccgcgctcagattgaggatatgagtgaaaccatggcggcgctcgtcggtgatgcagataaagcgcgagctaaacgcgttaaggaactgaaactcaacgaagcaactacggggcgtatcaataacagtaacgtgagaatagacggtaatccgttaggcgagaaccagatcgcaatccgtattttcatgcgttacgaccttggtgcggggatgggcgataaaggtaccttcgcagctcaagcgaaatccgttgtctcttccgtgggtcatggtgtgaacaaaaccgaagacgggcacacccttgatgctatcttcagtggcaccagtatcgctaaccgtatcatcggttcaccggaagtggttgggactgtgaatcttggtctcctctacgcaacggaacgagctgttgatatttattttaacgacgccaaataagagcagggggcttcatgcccctgctcgtttatttcgctgaacgcagtaccttcttgacgtacgtcaagaatgcgatgctctgacattaaaaggaaaagtgaatgaaccaagaacaacttaacacggctcgggcagcgagctttgttgcgctgacgaacgcggtaacgttggttgctgaggtcgtacgtcaaaccgttggtaatgatgccgccgatcctgacgtgaacaaaaaggttatgccgttgggattggaagatgcggttgctgcgcgcttaaacagccgtctggaaaccaaagaacccgtaggtagtaatgcgttggagggagcgcagtaatgatcaccaataaaaccgtttatgctgttgagcctattgtcgaagggtttatcaaacgtaaccaaatcgtcgcagccattccgggcacgccgttagccgcggtttgtgaaaccatgcactggaaccagccgccggaagacgcggatgcgttggtgcagcttagtgctgaacgtatggttgttgctgaaacacttgatgaaaccgaagatggcgttgtagcacctgccagcgaacgcgaggtttatatccacgatgaagttttacagaccgcagttcaagacgtggtggaaaaagtggtgtatgccaaagagttggcgcgtaataccatcctgccgaaatgccgtgcgctgtacccggaactggaaaaacgcatcgattcgatcatcctggcaccgaaactgatcccgacagtaagtctgagttactatcctgagttttataactccgaagagtaccaggccttagttagcgattatgacctcaatggcttgatttcgattaataacgatttcactccaaccggaaagcttgcgtttatcaccggtgataagctgcgtacgttgctgtataccggtaatgaaaacctggatcgttttgtacagcaagcaacggaagggatgagcgatcaggcgctggaagacatctacaactatttcttccgtggttccgctccttcttcgaacaacaccgcttatctgattatatatccggatagcgataacgttgcattccacggttcccgcgctgcggcaactcctgcattcctctgctatatgtgggccgttaacctgctggaagatatccaggacggcaacgacatgatgcttgaaaactaccgcgctaaaatgcaacaagctcgcgctgcggcgatcaacgggatggcccgcgtcggtcgtgatcgtatcctgcgtatggagcgtggtgagctgattctttctgcaccgtcggcttctcagattcaacgtgctgaagatgcgtcaacgatgacgattttcgttaacgcagatgtctacatgggttatctgcaagaaggtggttcgccggaagcactgaccgcagctgtcctgttagaacgtgaactcatcagtaaagatgagctgttggctaacggtgcaggcttcatgcagcattaccgtaactacatcaacatgaaagccagtcagcaggccgcaaaccgcttacgtgcatacgcgttggcattgcagggcgtatttgctgacctgattacagtggacctcgatgaagatacccgtaagaaggttatggaaatcgtacgtggtgaagttgctacccttaccgataccgacgtagctaacttccagcagtatttccgtacgctgtacgtgaaaaccatgcatcacgaagacgctcaaggcgttaaccgtctcatcgatgagatcgatttgattatgcgtgaacgtcctgaactcacggtgttcgaagcagcgaccatcgcaacgatgcatctgaccaccgattacgtggcccagcagctttacgttatccagattagcgaggtgtaaatggcgcttgtccgcaacggtgctgcggtgcttgcggactgggacatacaagaagataaatctgttgttactcgtggcgggtgttcgattctgacacccgtccgttacgagggattgggtttatctatcatcgggagtgagaaccgggtttgtgcgtgctgcccgattattcttcccgatggtcagtatggtgtcagccacgcattgacccagctccatatcgacccgtctgacatccgtgaaattaccatggatggccagccgttttatgagtttgtgtttcttcccggtgacacggtgttggtgtcaaccgatgtcgtgatgcgaaactctttcccatggctgatgtataacgagatctatacgctcggtaaagtgccatggtggtacactgagaaagaaaaatatcagctgctctacacgtcagcgaaattggcaggcgttaaactgaatgcggatagcagcatctattctgttctggcttctatcaccacacgtgaccccaacgatcgtcgtcgagcatggcgtttgctttcggatgaggaacgcagcacgttaaaagccatcgatatcggattacgaaacattatcgatagtggtacaaacaccatcaccaacttaatgggtggttacgtgaataacgcaatcgatagtagtttggtttatcctgcggatacgatcagcgaaacagaagcgattctgagggggtgatatgttatcgtctatcgagactattgtcccaagagcgattatggaacgttgtgcgtgggtgccgagcaaaacgcttcctttcggtttattgcatattagcaccgataccgaactgaaaacgatgatgccacgtatccctcaacgtaccttgcgtatggaagacgggtcgtttccaaggatctgtgtgtccagcagtttgatgggttgtatatacggttacagtaccgcaatcaagcagtatttttctggcggtcacttagcccattggttaggcgggtacgttatttatcgtgttccgtttgatatcgccttacgtccacatcgtacgttattatccgatgttgatattagcgatgagcactggttatttcacgatccgcgctatccaaacgggtatcaaaccgagcgtatcggagaatgttttatcgcggctgttcccaaagggaagattacagatagcgatgggaaggaaaactccgttacgacagaatgtccggtgttttatatccatgcggaggttgataacgttccgctatggttgcgtcaaggcgagtttctggtggtaaagaaaggttattaccggatgcaaattaaccattacgatcatcgcttaggtgtgatggatttctctaatgtgtctgtttcacggataacgttagagaaatacctagctgccaaagacgacgcgttggtactgttggggcatcagtgcgccggatcgtatgaatggtgatataacgcttacgcgtcaccttctgacgtaaaagcgggaatgtaacgcttttttcattcagttgcttataaaggggttatgatgcaaccaccaattagtaatcttgtttgcaccagttatcttggtgtgaataagaaaggtattatccgtcctaatgctgacggtgcctacacctgtgttatcggcggatttaactgttttaacaataccgaagaatattacgaacttgagcgttcgaaaccgctgtttctggaaaacagcttactgcaaacaaacgcacgcaatcgttcgttgaaaggtgaatacggtcaccctaaaccagagatcggtcaggatgcaaccagctttttgcagcgagcgttacgaatcgaagaaacgaaggtaagccattgcttttctaagatttggttagaagaagcgggacgcgatcgtcgtggtcgtcctgtcgtgatggtgatgggggatgttattccttgcgggccgtacggtgatccattacgtaaagattttgaaacgccgttggtgaacgtgtgtttttcggttcgcgcgttaaccgatcctcagatctggcaacgtgagcgccgtcgtgttatgacccgtgtcatgacttacgattacgttaacttgcctgggatcgagtttgcaaccaaatatgactctccgacgatggaagggttccagaaagacgtagaacaggaagccaaagcaatcatggatgcgtatgatctcccgattacagcaccaatggtcgatgagcttgttgttcgttccggtggccaacacgcgctggctatgttgtctggcgacagtccggttgtcttcctggatcagttacgtaaccacctacgttgtgatgtcgttaaagcgggcagctttaatcattggtaaaaaagatgttgcgttatattgtgtacggaagtaatcgttaccgtatttaggtggtttagctcaacttacatcctttttgttatctttgatgcctgctaccagggccgttatggacaccgcgtcacataacgtcctttcgtcgtgatggacgaacctccttacccacatgggtaaggaggtactttttatgccgtcattttgatgtaagatcttaccagaacccattattctacggatacatacgccgtatatgaactttattgttaagtaggaatttaaaagatgcaagaagaacgcgatatgcctaaatcaccagatgttattatgcaagcctctgagaaagccaccaagcttgctgtgagtgtgtatggcccatgccatcaagaactgtcttatgtcgatctacttcatgcggctgagcgcgcattagcgtggacactgtatattcacaaacatgcttaccaggcttcttttaatgcggttaaagaagctgtttcaccgatgctgattgaccttgcagggcgtaaggcaatcgggacaatatccaccgaagaagaacgttcggcccttcatgaaatcctgggtgtggctgacgcatacggtatttcacttgcggttatggaaccgcagcagattactttcgatgtattgaacgatcgtgcatctatcgtaagacagcaaattggccgtgcgatggaacatccgtcactacctgctgttttgacgtattttaacaccgtatattggggttatacattacacccagaaatcgcctcaccaggttcggttattccgtgcgtcgatctgctgattcgtctgttgtgtaatacaacaatggaaccactgcgttcaccgcatgttctgctcacggatgaagaattggatgagcttcgcgctatctctccgaccgcacgcagcatggtgcagttataccgctacttacagaaagcggacgaacaagacttcatgtgggaagatccgtctgaaggtgacagtgatggggaagaagatatcaaacagacccgcaattacaaggtaattcgtttcgcgcggaacgttgcagtattattggaaaaaagttgaggtctatattacctaactgatagaacgcaaggagtttaagaagtaaaccttaaccgacttgtgttttccctatgaagaaagaatcttctgattttatccttttgatcgatcgaaaaaactaattggagtattaacatgtctgaagctgtagaaaccaccgtagcgactgaaaccacttctaacgtacgtccggaagttcaggctctttctgataaaatcgccgctggtattaaactggacgaatctggtagccagaagttaggcagtgatttcctgggtactctggtaacgccggaagaaaaagaaatcctggaaaaagcacagaaactgaccaccgatatcggtctggctcatggtctggcggtaggtcgcgttggcgcgcagttcatggcggataacaagcaggttgacgttgtttctgtaaccctgccgctaggcaaagacgttgtgtccgcaacggttcaacgtagcgctgaagttggtttcggctctaacgagaagaaacaggtttacggacgcctgaccaccgcgtataagaaatctttcccaacaactcaggttaagcatattcgcgacaacatcagtgcgtatgcagctgagctgctgaaagactgattgtaacttaacacgtctctctgtatgaccccaccgtagccctgtatggggttgcggtggtggttatgtcaaggttttattttttatcctttggggttagcgctgtgtttttatacacccttcaattagccaaatatcgttggctttcagacacacgagcgtttctactggacacgacggtgaaaacaggtaacccactcttcgcaccttcatgggaacttgttacaggaatcaaatcaaaaacgttaaccgaggatgaatataccataggctactacgcgcttatgcgcaaaagctttgttgatcatacaccggaatggttggctttattctcccatccggttgtggtgttagggtgttattgtcctgcaggaaatttctgtcaccgtcatttgcttaccgatatccttgaaaagatcgccattcaagaacgatttcattttgttaggggaggtgagataaccagtaaggaacagctcgattcattaatcgagttttggaataaggagtttgagtaatgagtgtttttcttatcggtgcagcaaaacctaacaacaatgaactattgggtattgcggaagagttggatgaacatggcatgatcgtttactctatcgacaaagcgctcgaaagactggaacggtggcgtaatctcgttacggatacactggatcgacgtagcatggtctacggatatatgttagaacaatacgatgtcgccgatagagcatccaccacgcgttctggcgcattgtttaagacgacaataggaagttaccagttcggtggattagaattgctggaagcgttatataagctctcagagggcattcatcacgatgatctcgatgaccttcgggaatacgtgaatgaaagactcccattcgtgattccagacgcgcaactgatgttattaacacaacgtgaggaggaacatctttacaaacttgcttgtacaacgatgcgtcatattcgtcgttatcgtaatcctgaattcattgaatctcaagaatatcctgatgtcattttcattcgtgaagccacgaacaaacagtaaataaaccataaaccttccttccctagccgtcaaggccggggaaggaagggaggttaatatgctttttttacgttacacgcgaggtgttacgttttgataagtattcggtacctcaaaggtatcgttgttatcaaagtcgaaggtgtagccaaccttctgcgctgccacagccggatcgatgtcgctcagataagccggacggaaatccgggttcactttgagcaggttcatcttatccagcagacgttgtgcaaaagcacgcacgccgtagttggtctgtgttaacgctgtgaactgaatgctcaattctaccacgtttggcgcatcgttcttgttacgacgtgatgtccagtcaccggtaccgtgaggcatcatgttcgtgcacagccaggcgttaaccacttttttgtgttggcggtctggctcaacgaacagcattgttgcgctacgataatccgccagcaggtcggttggaccaccagtggatacgatagacgacaacatcgggtatttggcatccggatccatcaacagatacgtgatccattgttccaggaagtaactaacggaacgaccttctttctcatagatcccgaaagtcgggttagagcgaggacgtttaacgtcagagacttcttcctggatttcaccggaaccagaaaccgggacgctaacgaattcaacttccaatccgcgttgcagaccggtaatcgaatgcgcaacttcttctaccaacgccttcagataaccaatctgtacatccgggttaggtagatagttgaaaccacgtggtgcctccagcaggagacagaacatttggttcggaatgtagttggcgttagcaacgtacgtaccgatattgctgatgtacccgttttgggcacctgcacgaatatcgaccatagccgcgttgctaagagcaccaacaccctgttcaccgagtagggtattatcaggacgcattatggactcctctcattacgccgcttctgctgcttcggtgttacgacgcagcccggtgatggtaaacgtacccacggtcatgcctggatcgccgatcaggctgatatcgccgtgatagctgaagccgttgtaaccgtcttctttatccaggtagaaacgtcccttaacagtcacatggtcgttgtaacggcccgtggtgtattccaggaagcgttcgcccatcagtttcaggaacagggtttcatccattcctgtagtaccggtggtttctgcccagagacgatagcacacgcgagtcagatcgcaaccgatgatcacgttgatcaacgaacgccataccgaacggtcgttattgtagatcgtgccccaagccgggaagaagttggaattacggttgtaggtctgaacatagttcaagccgttttcccaatcacgatcgcggaccgttgcgttacgatacgtcttgttgattttacgcatcgttgtgacaacgttaccagggttgttatcgatgcgggtaccgcggataacaccatccgaagcacccatgtaagttgcaagtttattagcaacttccagcgtcaacggaactttacccaggcttggcgcttcgatgctttcaccgtattgcatgaataccgcagcacggcaagctggggtattgtaaagcacgctttctggatgcagacgatagtagttacgcagcatcgcgcccatggagctttcttcatcgacattcagttccacacccttccaggtatgggttgacgcaatgatcatgacatccggacgcagagacaagacgtttgccatcgctttcttcgtgtcgactttgtaaccaatatcatacacgatggagaacggatagaaagccatgtcttccagatcttcgcccattctgccgaacgattcgaactgctgtttcgctaacgcgtcgaaggtatcccagtcgacgtcaccgtcgctaccatcaattgcgtagaaggtgctggtaccatcaaagatgacgccgccctgatctgcatcgagaacttcgatggtttgatacgggatgccgttgtaatcgacaccggtgaagatgttcatctgaccttcgacgaattcaacgtcggttaacagatctttgttaactttgctttcagattcgtacagcttcttgacgacttcatcgatgttcttctgataaagatgcatctgatccatcggagcaaagatcggggtgttacccgtttcattatactcgtaggcatcaacgaccactttaccgaaggacagatcggtttcgtcatcaggctggataacaccttcctgcaacgcgaaggtttcttgttccataccgctgatcgtacgaatgaccgtcggcgcagttcgtgaagacttacgttccacgaactgaatgcggtacaggaaagcaccgatacgttcgatgatatcggtacgggtagggttgctgctcagcgcggtcggtgcttccagacgtaagccgatgttgtccccttcagcaccacgccagctcaccattccatccagaataggatagtagttgctctgggtaccatcagctgcggtcatttgtccgataaccacttcatctttaccgaaggcgttaggcgctacggcatctttgtcgtggttaacaatccaacgcattttcaccccgtcaacggttttatcgccgtcagggattttgttgccgtcggtgtccttcataaaggacccgtcagcgttacgctggtaaacgaccagtttatcggcgaccacttcaacaccgatacggatgcgtgctgccgttgcatccggcgcaaccaaacgttttgtgaagatcgcgctacctgtagaagccgcctggcgagcaatcagtgttgctggagaagcgtacttactgcggtagttcagcatatcttcaccgtagactgtagacagggcgtcccctgttaacagcaaggtgtcctctttaccacgaccaccctgaatgaaaacatacgggaggtgaatgggcgtgatctctggggctgtaaccggatccgtggtaagaccctctttaaagcccgtaaaaatcgcgcgaggcgtgctattcttaagcctcatggaactctccttaatttaaggaaattgtatgacataattgcacacgtgacacaatgtcataggcataacgtaaaatattacaattatgcgtaaatctgtgtgcttaacccgttttcttatatgccgtaataaaggaattacatatgttcatctctccttacgacacaactgttggaacaaaactaaaaggcattgaccgtatccgaactgctatcgaagttgcttacgtcggcggattgttaagtgcacccggtgaagaaagtggcgtaaacactcccgttctcgaagtcatcggcaacaaaaatacgttggacgatatcccttcttttggtcatccgttggtcattaaaacagtgatggacggacagcgcgttgttatcgaccaacgcgcttacgcgcgcaccccaacagatacttcacgcccaggatcgcgtactaccgttgttaacgaacgtgaatataactttcttcaatcacgtgcgtatcttcaggtaggatgggaatccttgggcacacgtccttttgaacgtcttggccctatcccgatgcgtgtcttttgtgattggattagcggacaaatcacacaacgtttagggctggaccttcaacaacgtcgtgatgttgccatcataacagcatggtattatctttgcctgtttaaagatagccttacaaataatgaaagactaactatggtgcgcaccatccagacaacgcttcgttacgattttgcgagcatcggtatcgtaaccgaaaacctgggttatatccctaacatggcagctttcgtaacagcattaaaagaaagtaatattagtccccgtttgaacacgttaacccaagcgttgttgtttgaaatcaccgcttacagctgggttgggggttatagtaaagaagttgctgggattgctttagagcatccaccaacatttattcttttatgctctgctgctgaccacgatcgtggttaccgtgataccgtgttggctcgtctcatggcggatcagcgtcgtatggcgcgtgacgtcaatgatttccaagccaacatgaaatacctcctggaggcatgccgtggtgttgaacgcttctaatcctacagcgcaatacttgataaatcatgctgcgctgaatgtgaactgccgtccattaatggacaaccagcatcgtatcaagatgcgtcgtattaccggaaagaccggcgcagtaaaaaactttacggcttggcatcgtacattcaatcttcctgatgataccaatacgttccatgtgtttgttattggacgacatatgggggaggattttaatgtcggggcgggtcggttgtggtggcgagaactcagcaagttctgtgaggtgaagggatcgtattacaatatctataccgaggacggtaaagaattcccgttgacattaacgtggacgggtaatctggaaaacgaaacgatgctggtctgtgtgctcgaccaaccgaatatcgctgaccttggcgttggtgattattactggcgcacctatctcaacgccgacttcgcagaaggctatccgtcatacacgaaaccgacggggcgtgaagtgcatgtccttggggggattgtaaccagctcgacacaggttctacagtggcagcgtcagctatacgcctggcgtaaaaagattcaggaaaccggtatcggctggacgcactgcagtatcaatggtgaagcggttgaagacattccgccgacaagttttaagatcggtgatagcattcaggtcgtctatgacggtaccgttgttcatcggtacagcttccgtgtagaagatcttaaaacgtacaacagcgatctggacaaaaaagtgaagtatcttattcatccgccgaaagatgaagtggataccaagatccggtatcgtgatgacgttgatatctacgtgaaagggcctaacggaaaagggcgttattaccacaccaaccaggaaaatagtatccgcatgctcacacatcgtgattacgggattcctgttgattatgtcagctacttcgttgaacgggttgatggagcagaatcgcttcgtgatttaaccctggaagtggttgtccgtgatagcggtttgaaaacgcagttaacctttgaacataaccgcatccacgaattgtataaacttccagacgacgtcatcgtcggtgcgatgttagaacagaacgctaatatacccgagttctttgcacgcacgcttgaagccagtgattatacacgcatcatgcgtaataaggaaagcaatatcacgatcgacatggtgacctccgcttacgggtataacgcgatggcaaaactggttgcagatagtccacaacgcgttactgacgatatgggtacccctaccgctgaagtaccatggggtttacgtgcaaatgcgacgttctttgagtacgacagtgacggtctattattgggtatcacgcaacatccggcaggccgacatttttatccgcaatatgaaaccacgtcctatgttgagggtcgatcgggtgttggtgggagaacgcttgattacgtgatgggtgttgccgacgtcccaatccgtgaatgggcgagttaccgctgttatagcgtaaatcttcgtaacggacaacctgtcgcgaacacatggaaggatgttaccgacgatgcttctgtggtaacggaagagaacggggtaataaaatggtcgttggatggaagaaagcaaaccggtttagtattgttcgacacctacttcttagcgtataagaccacaatacaacatcgtaaccacaccgtatggttggatgttacgacgggtattgatgttgaatatccgctgcctttcgaacctggtcaaatcgaagtatggttaggtgacgagcgagcaaccaaaagctacagcttggtacgcgatatcgattatatcgtaaaatggccaacgatcatgatcaacgcgaaacggtatttcagtgaagggaacacgcacacggttaccgtgagatgtactggttttccacgtacggacttaaccggtgaaaccgtttacgataccggttggacgatgcataatcagctttcttacgacgacgtgtttaatgttcgtgacgaccatgttgttcgtattgtggttggtggacgtatttacgatcgtagcgaagtggttaccgcagaggacacgcaataccctgccgacatcaaagtcaacgatggggtgccttatgcgatttaccatgttattgcccctatccgtggtctcgtgaacacagacacgtattatctacgcgacaaaagtcttgaaaccgataaacgcgttgaagactatatgtccttgtatttccctcgtgtgaagtacgatacgccggtaacgattgaaaacaaataccagcttatcagcccaacgttgatggcggtaacgtacgatcttatcaatggtgttatcgatcccgatcctgatatgcaggacgttaaactgatggatttcatggagccgtataaatggttctatgactacgatcctgcgttacgtaattacgattggcggatggtctctattcatccacacgacagttggacgccgcttgaagttacggttaaacaactgcggttcttagaacgcgtcagtcgtgagttcttgaaagatcgcgtggacttcacgaagttttacacaatcaaaggtgagtgataatgggaagagagattaccaatccggtgctttatgcacaacagcatccggataaactcgctattcaggatctcgacagacgctataccacctatgcgtataaagagatctataatggcgttgaagaagactggaaactttacgtccccaacgtggacgataaagttgaagactgggatacgaatgcggtgtaccgtgttatcgccgtagacgatcgcacaaaactaagtacccttaaacttatcggtcagctgtctgctccgttcgatggtcagggcgatgggacgacaacctttgaaggtattgacccgacgtggtcgtacgatacatggcgtgtattgattaatacgaacacgatccctgctacaatgaacatcgatcgtcgtttccatctgcatggctcggatattcgacgtatcgcagtgttccgcggttctgatatcagcgccaaaggcgaaatcatcagtgcgatgtatgacaacagcgggaataagatcagcgatttcattccgtgtcagcttatcgcttacaaagacggaacgaataaagctatctgggcacctcgtgaaggttactgcattaagcctgtcgaagattttgagcaggtgatggtagtaggttatggtgacggtccgcagccgctatccatgaaacgcatgatcgttcgtatcactgactatgtacgcaccccagaccagggtattaaatatattctggaagacggggtacgactgaaatcaacgtggctgagcagcagcgataccaaactgcttgagttaccgatcaacgtcaacctggattccgtcgaccttcaggctgaagtcacttacagtgatggttccattaaacattggccggttactggtaacaaggttgtgttggacggccttaacgtcttcacgtcccaggtcatcaacagcaaacatccgctggcgttacactactacctggacgacgatgaggacacatcctacgcgttaccaggagcggtgaaacacatcagtgtgccttataccgtcgtttctaaagaagcgaaaggggcttacagtgttaaactgttctgctatccgcaatgggtatctgatgctgtgggatacgagctggtgttctggttgtacaacgtcgaccgtgaacgttactacaacgtaaccgataaagtacaattggcgctgaacagccctgagtttaatccgaagaaatacggacaacctcaggaatttgcgtacaacatctggttagatgaagtcgatcctaccgtttacaaacgcgtacgtcatacgcagactattcgaatgacgctattgcaagcaggttcggcaacatccggtgattactggacagtaacgttcagctcgcaaacaacgccgacgacaacggatgtgtacggtcgtaacacgaaagcgttgtttacttacgatgttgctggtaacgcgtatgttgacttgacgaacaaacactcagatctgggtgaatggttgaaccaactttactacgcgacacatccgctctatcttgagaaaacggaatcgaaagcaccagaaccgacccactttgaaatcatggttggtcctaacgtgcagaaacgtttcgaaatctcgcaatggaataggaacaataacgtcccaggtggtacgggacaggataacgctaacctgtatatccgctggattaaagtacagaatggcgtcgacctacatctcggtatcacagcagtcgttattagtaaagtcgcataaggtaatacaacgatggagggtgctcggcaccctccatcggaggagtttatatgtcgattgtcgatccgaagaaaatcatcctgtttgaggaagattgggattattttcctcaggctgttccacactgggaaacaacaaacacaagttggcgtgatttagcgatcttgtatcgtcgtgaattcggtgtccgaaactctgcgtttttcatggcgttattaaacccaagattgattggtgttgatcctcatgcaccgaatttgacgtcagaacagattcagatgatcagtgcggaatgctatcttaatccatggtacttcttccgtgaagtgatgcgtgttccggctaaagcgggtgataacaaaatttcattccgtgctaaccgcggtaacattccgatgctctggggaatatttacccgaacgaactggtatcagatacagatacgtcagacgggtaaatccatgaccatgttaggattgttctgctatctaacctatgttcgtagtcgaaacaccgaggttattcagttaacaaaagacggtgatgcccgtacgaaaacagtagaagatgtgcgtagtatacgtgatctgctgcctgcgtatctctggacgctggatagccgtgattcatcgaacaaagagaacgtaacctacacacgtttcaagaacaagttatcggtaaagattccacgttcggataagaaacaagcaacaaacatcggccgtggtctaacaaccccgctattccatagcgacgaaaccgcgtttacgaaatacatcgaaatcattgttcctgctggtatcggtgcgatgggtgcggcacgcgatgaagcattaagcaacggcgacctgacgagtatcatctatacgacaacagcaggtgaattggataaacgcgaaggcaaatgggcttatgaagttttcatgcgttcagcgccgttctctgaaagtttctttgactgccgtaatgaaaagcatctgcatcagacggtattgaacaacgtgccgtgcgagctcagcaaagcaaccgtcaggatcggggcacaatggaaccacgctcagctgggcttcagtgatgaatggttagcaaaaaccatgaacgaaacggaaggtgataaacttcagaaagaccgcgactacatgaacatctggaccaacggttcagcagaaagcccgttaaccgctgagatggttgagatgatcatggcgggacaacgtgaaatcgaccatatcgagatctcacctgaaggctactgcattaactggtatatacctcgaggtaaaatcgagacatacatgcagaacaataaggtggttgctggtttagacaccagcgatgcaataggtcgtgacgctatcggtttggtgatggtggatgtagaaacagcagaagttgttgcgacaggacgttttaataaactgagtctgctttcttttgctcgttggatggccaacttcatgatgcgttttaagaacgttacgttgattcctgaacgtaaaagcagtgcaatcatgctgttagacgcaattgaagagttcttgcggcaagcgggcatcgacgtgttcaaacgcgtatacaacacgattgtagacaggcatgctgataatccagcgatgttcgaagacctgaaattaccattgagcatgcgtgatgaaagttggtatgctcaacgtaaacggcatttaggcttcacaacggatgcgcgcaaacgtatggagttgtattccgacatcttgatggaaggtattgtagaaacccgcgggcagttacgtgacaagatgctgtgttccgagatcctcggattggttatcaaagatgggcgtgtcgatcaccaggatggaatgcacgatgacatgacgttcgcatggatgttagcgatgtggttcatcaagcgtgctaagaaacagatccattacggtatcgatccacttaaagtcatgagtcgtttaccagcatctgtaacgggtgaaatcgatccgtatgaagcgtatcttaaccaacagcaggcgaagctacgtcaacgcgttgctgaaatctatgagttgcttaagaccgaaaccaacggccttatcttggatcgattggaggcagagcttcttacgtataaaggaaaaatacgtggggaggattcagcggctgtttctattgatgcgatgatcacgaaagcaagggaggaacgagcgaatacttatcgtcaaataagccgctcttcgaatgaacggaatatttctcgtaatgcgtggatgacgatgggccaataccgcccgggcggttttttctaagagtagtctgcagactccccgttaatactggcggggagacgatagcgtattataatacaaacgacgtataacgttgaggtacgccatgggtgattcacttgatcatgacacacttgagcaattacgtattttaatcaaacttgtcaagcagctggaaaccgacgataacttaacagataacgcgcattttattttaagcgataagaacatccttgtcgaacgcattcaaaataaatgccaacgtcttctgttgtatgtagaagatcctgattgtttaagcgctagaacaaaacatctattcgatgcgggtattcgtgtttgcgctcaatcggaggatcttttctgttggcaaagaggtgtattgtttacgacaaaaggtcgcgttgaattttaaggcaaacatagtcctcctctgggttccattcccagaggaggctatgaggcctgagcatttttggtctgtcgagcactgtgagagaacgacagttaaccaggagaggacaaacgacttaaagggatggtactcctgggtgaagccctatgcttcaaataataaccaacgtcagtaaagttttaccgttacattgttaacgtgacatcgcacgtcgaacgtaatagttacggctaaacacacgaagcaggatatacagaaagacaccggtacgtgtcgctgcagcttcagcgtcgtttctcgcgttggttgctttcttaatgacttcagagccaagtttacgcagttctaacagtttcgggttgctggtacggttggacgtgtacacgttacgcatgtagaataagaacgtaagatcgcgcatatcgaccttattcaagatgatatactcgatagcatgctccattacaagccgcaacatctgagagacctgttttccgtctcttgtcggtcgttctacgttagcgctgatatagcttaacgctcgctcaagggataaaagattggtagtatgatgcacgtcgaggatgacgaccatgagttcacgtttaacgaaacttgttcggtcataagcgatttcgaacagatattgacgataagtggtttcgttgcgtttgatatcgcgaacagcgaggccgtcgtctaattctacagtttgagaggacgtgcctatcttcttaccctcttcatacatcgcatagtacgtatcggtgatacggttgataaccttacggattccggtattcacatcacgcacaaaacgttcggcgacactatctggttccagggttgaccagcgactgaaatgcgtgctattgcgcgcaatgatggcgttacagcgttcgtcgatgtactcattccagctattcatgcgcttgatgcctgatttgagggttaactcatcgtacgccttaatggcgatagccggatcggcgttataaggataacgtcgtgctaccagaccgcaaatgaatttataatggaggacttgcattgctgcaagcatcccggcttcacgaaccttttcttttttgatttgtttgctgtggaagatcgcataaagcaaccaacagcaacttaggttaaaggcgtttgaggcaacacggttggtctgcgtattgtagaagggtagtttactcaaatcgcgccgtaagctttcttcatccatcatcaagacgtcggaaaaccatgtatcgttatgtcttgttgtgaatcggattttctgtacacctaacagaaccccaccgaaaaaacgcatgtgttcttggtcttgcgtacggaagcgtgtcgcgtaacggataacctgattaacaaaatactcgtcgatgtcaatgccttccgcatgcgcattaaacacctgtaaaatagaagacatgagcatgctccctcagatggtaaacgtaataaagactgtcatatcatcgcgaaatggagattaaaataaacctacattaccttcctgattacactcgcggaaggcaatgcaatgccgtccataccacataggtcagacatgaatataggattagagtatatcgaatatgcattaacgtttaaccttttcgaattgcatcgaccccttcaactggggtatttggttaacgcctcggcaaacgaggataacttccaacttcggttcacgccgccaggattacccgatacaatcgttgtcgagggtacgctagacaaacttcgtgtttatctccgtgacccagatgaccctcagcttttttatcctgggttcgcttatctggttaaaaaccacgtgtttctctttacggataccgacattgacgagtggtttactgaacagtttgctgaattcggctgtgttacggattggcgacacaaaggcatgtcgccctgctggattcccattgaacggttttggggacatcaacatcagctgggttgttacacggttgttttggaaaccgctgacttctttgggcatcgtgtattacgtaacgcgaaatacggtcgcgtcgtggacccatcaacgataattcattcaggtaaattaaggattacaagatgagctttgttccaaccttttctaacggcgttgcgagcgccacgcttgacgacaacaatgttaccgtggaaatccatcgtgggtatctttcggtgtatgataactcaacgggatcggatgcctgtatattccgttaccgtctcgatgaagatcgtttccagatgggcgcaatcttccagaagtttggtttggatttcgagacccgcgtcgtcagtgcgttacaacacaacccgctatggatgatgtcggctggttttacgcgttggctccactacggtggcgatcctcaagcgggcgtcattcacttctttctggacaacgccacctacaacaactgcatggttgtaggtatttcaattaaaccagaacagttacaccgactgctttgtgttgatgcgtatatcgatgaagacacattgcaagatgatgctgatctcctgcagatgcttatcaacggagatccgttagacttacgtcaacaagcaccaaccgaacaagtatgctacactccgacctttgcacctaaccaagtcctgcatgggcttggtgcgctttatgcgatgttgatggaggtttatgtcccatgcttcaaaaattaatgattcccagcgtaaatgcggtcattgacgatgagacaaaagccgttcacgaattcgttgtttcaggaaaccattactacaccgtaagctggtatccaccagacaatcatgtcttcctcaaaccgcatatcgaaatccgtcgaggagaccatgaaggattgctcttagggtatatccgactcgacggagataataccccaccccgttttgaaaatgtgaatttacgcgatccacaacaatggataaagatcattgctcaatcacgtttatacaagacgatgataaagaagcaagatgtattcgaatcgttaaaggttcatgcagaaataggctgttagcataaaagagataaacagatactactacgccgtctcgagttatctcgagacggtaagtttatactgttttgcttattcatttgagcaatactgaatgcttactctctcccttaaaaaggagagggccggtaggccagtattacttgggagaatggggaggtggggagcattatatctgtttactatctttagatagaacataacttaatagagataagaatacgttattaacaatacgtaaaacataacctcttttaaacttaatatgttaattaaacaacatatcaaacatactaaggatttctatcatggatcaattaccaggattagataacattacttattcagcttctcttgttcttaatcgtcacgtcatcgctgtcacgagtggtatagtgccatgggagtcgataatgcaatccccttgttcgttactattgcgtgtgcagcataccagcgttcctgtacacaagccctttgtttacccagagcgtgaagacaaatggttgaaaatggtggagggaccactgcattggacaacgctagcagatgaagaaggactaagcgaccaggagaaagacgacgtgttccttagcgtacgtaatctggctgctttcgtcgtcactagccttatggatacccatgaggaacgcgtagccgaaatcgataataagttgcgttatatactcgctaatccggatcgtgaaccatacgctaaagaagaagtcgacggtgttctgtttgaatattaccaattcgaagttagtaatagtgacttaggatcgacaatggtgcccacggcacgtttaggtcaggtatccgatttaatccgtaatgattggctttatcgtacgcatcctgttttctttgcgaaaggcgatcagccgttaattaccgcagcattcatcgcaggatacaataaagaaaccgataaaggtgagatttatctcgcggtttatcgcggtcatattcctatcagtacgggcggtaagctacaattttggggtatcgatttcactatcttggattgcgggttactgttacgcgacaaacgtgcattaacgctcctggattataacttccaggatcttaccgtaatggatctgaagcaggctattcctatcatggagtatcctaccaaaaccggcgttaagaatttcatcgccgctgcagaggaaagcctgttaggaacatggcatgttagcctgcaatacaacgggacagagtggtatcgtgataaacatgctccggaagttgatcctgcgttaaaagagcgtttattacgcgagcttgaacgattcgttgcaatggagaaaatgaacaatgacgttaacgacgaacaatgaagacatcaaagatgcattcgtgagcgttgaacttgcggatgtgtctcttattgtccgtggctataaacccgaaccttataaacaggcgagcggtttcagacttgcccgttcagcaagccatttaatgccagatgagatggcgttgattaccggtaagatacgtttggtttttgaacccggtaatgatggaagaatacccattagtacaacgtgtgtggttttcattgatgactatccgttagtgcctgttgaattgtctacagaacatcaatggaccaccttaccgatcacccgcggctcatgccagaacttttcgtgtaagacaccaatacttcaagagatctcttcgtatagcgacggtgaaccgatacacacgtacgcaccgaagtatttcgacgacatcattttgttcttgttggatacggatgatgttgaaaaataccttcctgaacgtacgacgttcgtcagcccacgtaaactggagattgttcgtggccgaccgctgatgttggatccaaccaccgaacgtcaactcttcacgttgcgtaaggaaaccgataacgacggtcgagaagtgtgggagttccgcacagattatctgttgttaagttttatattcccgcaggatccgcacgaacccattcaggttaagccgggtaaatggggagacgatgcatcgaatgaagaacgtgtatcgatcgcgatgcagttgaagatgatcattcttagcgcgttgcctcgttacgagtgtttacgggatcgtattttcaactacgtcgatacgtcagaaagcgatagttaacgaataggttatcatggataacatcagtgttattcgtgagtaccgtgccgccatttatgtcggcccaatcgtcgatgtgttagatctcgctttacgttcgccattccctgaccccgatgcgcgtcacctgatggttgaatatgttattttacaggccatctttgattgtggcctgttttattctgatcagttaggtttggcgcattacttcaagccggagataacacaactgttacaggtgttgtcgaggaaggtgcagacagatgttcgtaaatgtgttgtaggtcaattagagccgaatttctggtatcgatatgaattcgaattagaaagcgctacattggaatacaacatgctccggttggtgatgatccgacaaggagtttaaggaggatcttccatgacgacgaagaagaaagtaatgccgaaggctgcgcatggtatctacgaattgtggttattggataaacacggctataaggtcttaacgaaagaagaaggacgtcatgttaaagcaggactcatggtactacaaggtgagttgttgctggataatggcacgttgtttctgaatggaaggaaaattgctgtaaaacaaggacgtcgatatgagatttgttatccgttgcgtccaggtgcgatgaagaatgcgctttacgcaagtatgcgtgctgcgatgaaacgggaagggttgttatgatgtgtgataaaccgcaagtaaagctatataaatccggctatacgacaatagaatacattgaagggattcacagaaagaaaggtgcggcgtacgtgctgcattattccaaacatcacgatacgctatttgcttttaccgtagtaaatatgcgaaatgtgagtagtaatgatatcgaacgttggttaaatatccatccgaccgacgatcgtgttcaatttatcgttacgccatgtgttgcgttttctggtaacgcctatcgttttatggatagcgaagacggtgaattatttctacgtttgtatatcaccgacatcgcgaagacaagatcgacaccgtcattgatcgttgatgagacaaagacgcaatacggtattcagttcgattgtttaccggacgatctcattttcagtaataagctatcaacctcggcctgtattattgccgctgaatttgcgaacgtgctgaaagtgtttaaacggcaaatacctccctcgaaaacaccgagggaggaagctgtcgttaatcagaagtaaccggtttgtagtcgaatggcgcgacgtttagtttgtggatcgttccaggcagcaacgccagcccacgtttcgttcaggaattcctgatatgtgttttcagcatcagcaaagcgatcgatgtattccttgaatgcaccgacttcttgtccttgtgctgtaacacctctatcgagacggataacggttctgttgtagatgtcactttgcgtggcgtataaacagagtttgtagaagtcgttccaaacctccatgctgaggttggtaagttccggatcgtgggcaaggaaacagcgtaggctcaggggaaattgtacaggcgtgacgttgttcaccatgatggtgttaggggcgatgatatcaacgttggctgtactaagaacgttcatgggaccgaacgcgttcatcccttgctgtaacgtgttgcttgcggggttccacccacaaagctgacgttgaaattgggtttggttgaaagcgccccattgcccgttatagtttattccgtagttgttcacgctccctgaaataatggataatgcggacgtgatataacgtccctgtgtggcttccaacggaatgtggaaaacataacagttaatggtgacttcttcgattgtgacacctgcatcatcaaggggaataacggtttgtagtcccccgtagatatcgatgtcgccgataacccgtttacggattacccaatcggtaatgatgtcttctacggaacgaggatagcgattacgccagtcgtaacgatcgatatagcaatactgtaggatatctgccggtattgtacgacagatacgatctacactgtagtcaatagcacccatgggtcacccctttagcaaagaaagattcattgtacgttaaatacatattaagttaggagttcacatgcaagagaaccaagtacatatttgggctgtcggtggttgtggtggcgaaatcggctcagcatttgaaggcgaagtcgcgaaaggattacacagcatgacgtatgtcgataccagccgcgctaacctacgcgatagcacactgggtgacgatcatatttacatctttaaagatgcagccggtcgtgagttagacggttctggtaagaagcgtgatgagaacgctgaactgatctgttcacaaatcccgggtattctgaataagcatacgccaggtaaatttaatatcgtggtctttagtctgagcggtggttcaggttctgttgcaggtcctgcgttggttgctaacctgctggaacgtggtgaacgtgtggtgtgttgcatcgttgcctcgttcgatgatgagcgtcaaacgatcaacgccgatcgcaccttcaaaggactgatggcggctgcagaagggttgaaacgtccagtgattgttagctatcacatgaatggcgaaaatgggaaatcggagcaggatgtcaacctggacgtgcgggttgttattagccagctttgtgttctgttttctggcgagaaccgtcgtcttgacagcgccgacctggaaaacttcttaaaccatccacgtgttaccggtttggaaccaacgatcaccgaactgaatacgttcatgggatacgattggacgaaagagaacgatagcccgattgctttctgtacgctttatccgaaagacgcgacaaaagtcatgggcgttagcgctatttacagctgcgatggttttgtgcctgaaagcagcccaattcgtgaagcgacgtcgtttgttttaagtaccgatcgtttagggggtattatcaaacagatcgcggacgaagcgaaacgttacatcgaacatcgtaacgcacgtcaacaagcgccgaaagttggtgacgaaactgtagcggaagcgaagaatagcggtttcttgcttttctaatgccgaaccaaaaggttcaagtgaatggggatgcgctatgtcgctgtttatctgcgaacgttgcggtcatgttgatagtaccgaactcgcttacgagaatcgacaaggtgttggtcagttcctgtgtacgaaatgccaaggccgtcaatggcatggctattttccatatcagctatatgacccagcaaaacacgcacatatcgtcaaccatccttcattgaaattggatggtcgttaagttctatcgagcctgtccttcggggcaggcttttatgccgtgtaggagaaagcatgggaaagtggtgggagaaaataagaaagcggtttaacgattggaatcaggaacggcaagatcgtaaggatattgaagttatgcgcggttatccggcgtataccaacacgtaccttacgctctactacaatcgctcaaagaaagaatggacatttgaatgggatgatttgttcgctaaccccagacctacacattggccgttccacgactgtgttatggttgtccctccagataccagagcaacggaggatgaaataaagcgtgcctgggacgtcttagacgaaagaggtatcggtagtattcgaagagggagaaaatgacgtcagaaactctcctgcttcgttttacgccgtatattttaactattcccagatatcgtgtgtataaacaatggggacttaggaaaagagtatgaccaagagattagccaggatcgatttgtacacattagcatcgtgggtttcattaccgcttatcgattgcctgagtttgcatcatcaacgccagctttctccgaaggaaaaattgcaattaaccgagttgttggtggatttcgatcttaatcagagaatgacctggactcgacatgatcctcgatatcgtcatgaatcgttcgcagatattctcggtccgatttggtaccaacctgaatttcgagaagacttcgatgttgtccagggtatggtaaccgaatatctgtcttatcaccacaataagctgtttggtaagaactggtcggataaccgtatttacggaatagaacgtgtgtgcgattatgcctatattgttgatcttggccgcgttcctaaacgtcaaataaaaccaacaccgttaaaagcatttgagttccaagaaacagagtattgcgtcgatcgtaaatcagcaaccgaacacgttgtccgcgtacgtaatagtaatcctcgagtgatggcgatgccgtcaattaacattacgatcaatatctgcccgtctggcgcgattgttgaacgtccccaggagctaacagatgaacaatttgaatggcttgggcaattggaagaacttcgattggctcacgcaaaacgaaaagcggaacagctcgccaatgaacccgtttatattaaacaaggccttgcccttaaggagcgatttaaacaacgtcgctccgtcttcggtccggtgcaacccgtactatatgagtttggggttcccgagtaccggatggatgctgagtcggtggcaaccgctttcctggataacggtgaaatacatcgacaaggtgcacgttcttcgggtccttttagaccggttcgagtccagcgtccacgcagacatcggcatactaagtcgagaacaggaaatgatgacgtgtcacgagacatggacagatctcattaccgaacttattgagcgggctggcgacacagaacgtattttcaatgaagacgatccgtcaatggaaagacatgttgatgcttaccatgcggctgcgtcagaacttacgaatctcaccatggcgctggagcctgtcttcggtagtgagtttattcacgtatgggaacacatgttggaagggccttacaattgggcgttggagagttacaatgcggccacctttgttgcgatctttagagcaatttcagagagacgattctaagccgtcggttattccgcgcccaagtcaggtttcgatacatattcgcacaccacagacagggcgtcggtacatcatcccgttattaaactacagcgaatatctgtttacgatgctcgatgagcgattaccttatttctcaccgaacggaaattatgatattcacacgttgctttacgacacgattgaactgtatctgtacaaacggaatatctctggccgtgatgtcgacatgcaacttgagttcgttttggatgaagttttcatgcatgaagactacggccacgatgagaagttcgattttcgttgtcgtttatcggtgatgcgaagcgaagttaaccaaatccttcgtacgtggattccacgtgtagaagattggtggcatttcaattttacgttagatacgagtatgacgttatggttggtggtggaataatgcaatcaaagccgtcggcatttgtgcgttatcggcagaaacctaattttcttaacgggaaagatgacggcgtgcggatatcggtgtgcttggaaaccgtgctggcgatgttgtatcagcatatggacaagtatgctttcttcgaccgcattaacgtatcggcttacgacgtgcttcagtatacgacgtacgagtattggtcgttacgtatgcagcgaccatttcaatcgtggtatccgccggtatatgaaatgataagcgaagaactgtgtcaggaactggttagcgtagatcatgacggtgagtattatgaagccatttatagttatgttgacgcgatccaggaaaccgttaacctgatattcccgtgctttgactactcgatgacacagatgttaacggccagtgggttattaccgaagaccggcgagaacaacctcgagctagaaggaattcatggatatgttgcctttttcaacattgaatgtggttgatcgcggaacagatacctatcgtctgacggttactatccctgactggttacaagcagagctgagcaccatgaatgacccagaagatccgttgcgcataacaacgttgttggtattagcgttacggtatcttaatcgtcccgtcttgtcacgcgaggcgttcgagaatgcatatatcctcggatacgttaaacgtgaagatatggtgttgtttacgaagatgcagctctgtttcttaaatcagttatgtctgttcaatgtcggacgtacgactaacgcacatcgttacggatgggaggttgtacaaatctatcctaccgttatggtagtatccagttttcgtcgcgcattgtgggacgatccagaaaagactgtggcgtcgttaatacatacgccgaacaagagaaacacaggatggaaaaatacgccactgagcgccgtcgccacgttataaaacgcgatgactactatcttgagcaactgctcgaacaggcggttaacgacatctatagtcaggcagaagacgattactgtttgtctgggtggggtaccgaaggaaggcagatgctgatgaggaatctactgcaagaaattgcggatgttgtcttatcggatatcgacgatgactttatcgatgaatactgcgaggagagatcgttatcacgaaaccttatcgtgcgtattatcggacgtgtttattatcgtgttgtccaggatatggaattcacaaaaacgttttatcgtggcggaacactatcatctatccgggtctggtcagcgacgactttcggatatgaatacattttaaataaaggatgctattatgccagcttctgatttagaaaagattggctctgttgtgagttttgatgtgtacgccccagaacttggggttaacttcaacggagtagaaattagcgctgtgtacaattatcgcacagctgtacgtaacggtcgtgatgtagacgccattcaccaacagatttattcccggctcccgtctagtgtaccgaacgatccgacgaaatacaattacgtcgaggtcattacagccgatggtgagtatgtgattctagggattccttggattaaggagagtacaatcgtcgttaccaagacgctgatctataaacccagcatcgttattgaggatgcgaccgacgtgacgaaaattaatcaaattcttaatcaggcgggttacaccaagattgttgctaacgacttgattaatcagtaaacttttacatacggtactatatattttgagtggttagtgccatcagtgaaataagataggttcgtgttttttattccttctttggcggaccacctctcgtgttacaacctccctctgatctagcatcattgtacacgagagaagatcttgtttcacgaacatcatcgatatctttctgtcagttattatcctttttaaccgatctggcttcggctggatcggttcttttttatgccgtccttcttttttaacagatatacgagatgatgtagacagactaaataacttttggaggatttatggaaaatccgttcttttacgatgaaaacggatatggccgtacgttggatatgaccaaagaagcggtacaggattataccctgttcttaatgcgcatgcgtgggatatcacagcaggaagcgttgcagtttgtccttgatacggttcgtcctggtggaaaatacgggatggttgatcccgactgccttgtattaacacagcgcaccgaaggaaatcgagaaaaagaagtcatcaagttcagccaatacttcaatgatattaaagaaaataatttaattatcacgccggtgtgggctaactgttatccacgtgaaacacgttccagtgtgctaagcgactttgcggttgaaaacggtaagttgcgtaagaaacaaaagaaacaaatgtcgatagcgcaagcacacggacgtaaagatgaagctgagttacacgataaacgacaaaccaacaccaagttagataacaacagtttgtcaggaacccaggcgtccaagtttaaccctttttataatccaattgcgcatccaagtttaacgacaacgtgtcgctgtgcttcaggttcagccaatgcgaacaacgaacgcttccttgcgggcaatttccattattacgattgtgatatcgcaattgaaaacatcgtgagtattgtccgcaacagcgatcgtaaagccattgaacaggtaatggtaaaatacaaactacattaccctacgccggaagaggtttgggctaacgtatcgaaatgcttgcatcgatatactttcgacccagagaaagaactgactatccgggagttaattaccggtttaaccccactggaacgcgcctgctacatgtatagcaataacctgtactcgttacgtgagcttaatcctgaatttgttcgagattttcttgattcgttatgcgagctggcatccgaacctgttgaaacgatggaagaggctaaagccattattgcttccatggataacaacacggtcgcttggattacagcacaatgtacggagttcttgaatggggaagcgatttacgtagcgctagaaaaaggaaatgagcttggttatcgtcttactgcagcaacgacaaaattaatgctacagcgtattcaaagctatgctgatttgattatggcgttctggcgtaccgagaaccaaccggctggtgtttatgctttcccatcagcaatccgtgaagtgggtgtgttgtctgataccgactcgacggtgtttacctgccaggagtgggttcagtggcgatttggaaatatggagatcaatccagtttcgacgcgcttagcaaacacgcttatctatctggttacgcagattacggttcatctgatggcgatgtgttctggtaatatcggtgtggcgaaagagcatatgtacgtgatggaaatgaagaacgaatatatgttcttgattctgtcgttaacctcgatgggtaaaaactattacggttacatgaccatgcgtgaaggggttcctatcaatccaccgaagctggaattgaaaggtccggttatgcgcgatgcgtcagcaccaaaaatgatcgtcaaacgtgttgaacgcatgatgtgtggtatcatggataagctgttacgtaacgagaagatcagcattcgattggttcttgacgatattatctcgttagaaaacgaaatcgttgagtccatgaaacgtggtgatcctgatttcttaacacgtgttaaagtgaaaccgcatgttgcagtaacgaaacagtcttacgatatgtgggaagaggtgtttgctcaatcgtacggccattgccaggaaccaccctatgttggggttcgtgtgccgttggcgacgaagaacaaaacgcttcttaacgattggattgattcctgggaggataaagggttacaacaacgtttccgtgattggattgtacgtaacgataagaaaacgataagcaacttaacgataccattaccggtgatcgaagcctccgggcttcctgatatctttattcaaggtatggatattcgtcgattgatctctacgctcgtgcgttcgtattacgcgttaatggaaagttatggtattttcatctcgaataaaaacaatacattgttagcccaagacatcgcagcaagttatttaccgaagcaagaaaccgcagagtaacataacccaccaccccatcctcccttcccttacgggttgggaggatgcaagggaggagggaggttattatgcaccagcgggaagaatttttaagaggtcggcaacctgtgcgataacttcacgtcttaaatcgccaggtaacggagaggactcccagttaccttcttttagactccggtcggcagcacggtacaggtcattatcgatttgactgctgaacccgacgctttcagatacgttttgcaacgtgacgagttgttgccataatgacagacaacccagatcccttgcccatcgcgtttgccgaagatcgacggtgtaacccattcgggttgcttggtactgatccccgtataaactcggtatctgtttaagcatgtcggtgtagcttcgtcttcttcgtaataaatgatgctgtacggacagaacgacttgactgaatacgttatcaaggtcgttaacgtaaattggtgatttgagtggattcttagccggagatacccacaaacaacgattgcgtataacaacatcgttgtgtgagtataatgcgttaaccaacggaaaactcgcaaggaagcttgtaaccggttctttaaccacccatttgccgtcgacgttatgacccatgaccaaagaccacattcgatactgtagcgctaataaaggtacatcaaccataatgaccgcaaaacctcgtccttcttcaaccggctttcggtgaagaggaatgtaacgaagatttgcgtatgggtgcgtcacgattctaaccggtgaccaattacgccagttgtcaagaacgtcacgtgaaataagacgactttcaccggttgcgataatagcttcgtgcaatcccggatagaaagcaccgtcgaataacttacccgcgtatcttgatgttgtcaacttaacacgattacccaattctggagtaagatcgagaatcatgtcgtagtaagtttgtactgagatgtcgtatctcatagggagctgtgcgagcagcaacgcaaggatgtgatcgctctgaaccgcgaaggtaaaaccttgatagtggttctggattgtctgtaggtttctttgaacttcgcgtattagatagtctttctgagggacgggttgcacacccgatgatgttcgcgggaggttatttaaaacacgaaacatacgaactccgtaagaagatggtaaacggatatgacattactctcaataagagaagtaaaagtttacagacatatcctgattatatgtagaaagaatgttgcttctcggcagcgttcgcctaggggtttatatcgttcaatgtggttacaccaatattgaaaaaaatttcagggttatattacctaggtgaatgagcgagtagaagctgattcaatgacgtcatttaataaagtttaagaaaagaggaatcccaaatgggcttagacgtacgtaataacggtaacgataatgtagaaattcgtgcagctgaaacccgcaccgcacaacgtgctgatgaggcgctggaaaccgctgcagattttgctggccagcctaaagtaactcatacgatgcgtacgatcaaccgtacactgagccgtcgtattagccgtaatactggctccgagcaggtactgaatctccgtcgtctgatggaaaaagaactggaagataaaggattcaaagacgacttcatcatggtgaccgtcgatcctaaccaatacagtgtaccgtatccgaccctggttgttatgagcggtgcaaaagttggtgaccataaccacttcttcggttatgtgcttccactggttgccggtttggctccgctgccgcgtcgtgaagaacaaggcccgcatggtaacattctggtgccgcgtacctgggttgataacctgaacggtacgttcatcaacgaagtcatggcggcaatgtatgcagctatcggtggtaagtctaatggtactgctcgtatcgctggtctggctgtggtgaccaatgaaatcaccgctgaatctgcgcatctggcaaccaccctgctgtctgctgcagataacgcaatccaaaccgcgatcgaaatccgtctcggcgataaactgggtctgccgcagttcaacctgggcatgatggcaagcgatcagccaatcagcagcgttcagtacaacaccagcggtatgcaggacagcgatattgttggtaaccctgtgcgttctgacatcactgtaactatctctaaccgcatccgtcaagcgatgagcgattacgatagtcagcagcgtctggtcgcaaccaccggttacattgacctgacctacagcccgcagaacccgaccttcaaccaaggccctgttctggttaacggttatccggtaccgccgactgtacaataccaaccgcgttacgtgatgaccagcgcttacccgctggagctggatgcgttcacgccgaacactttcgtgttgggtctgattggcaccatcgctacgctgaacagcggtatggcgtgggcacagtctttaatcagcaacgctgctcgtggtattggtccgcataacccgggtgctctggcgatggtactggatccggaagttaccgcaccgctggatctgtctactcaaaccaacgagcagatttacaagttcctgcaacaggtactgtatccgtctctgctgatttctatcgacgtaccggaagaaggcgaatacagctggctgctgcgtatgatcccggcggctgagaagatctatacgggcaaagttgaaggtgaagtccgggaaatctccgaaggttacaaagcactcttccgtgccttcgatgatactaccctgggttgcttcagcaagaaatatcagtacggcgcaccactggtctacgctaccggtaaccgtatcccgctgggtcattataaccaccaggatggtcaccgtcacgatattcgtgatatggacgatctgtacatgatgaacatcactaacccggataccgtagaagcttgggaagacagcttcgaccgtaccgatatgacgatgtctcagcgtgttgtcgctcgtcacgaaatcattgatcgtgttctgtctggtagctgggaacaaaccggctgggcaatgcgttacgacttcgatccgttagcactgcaggcgctgatcgaggccgctgctgatgctggcttcaccatccgtcctgagaacatccagcatctggcaggtaccgctgttcgtggtaacatggcagcacgtgctcgtggtctgggtaacatctccggtaacatctacgcacgtagcgatcgtccgaatgttggcgttaacaacatgggtggggcattcaacctgttctaatggaagaacgttcgatgtaatctgacgggagggagggcaacctccctcccttatacgtcctaacgttctttttcatttgtaggagataccccatggccatcatgctcgatatcgtgagtttcgatagacagctcgcagaacttcctttcacgccgattttgttgaatgattacgatacaaaagtcgtcgaagagaagaagaaattaaacagttttatcacccgtgtttactccagcgatacgttggatatcacgccacaatgtggttgtggtttctacaatcgtggtgagctgctcggcacggtgtgtccgaactgtaaaacggttgtaacctatccagcagaacaagagattcgttcgacggtttgggcgcgtgttcctgaaggaattgatgcgttcattaacccgttggtccatctcgtgctggcaagcgagttgaatatcaaaagctttgaaacgatgacgtggctcattgatgccagttaccgtccaaatgtaaaacgacccatcgaactcaagaactatctggagcagcaattcgatgtattcgggatacgtcgcggtgtaaatagttttatacagaacttcgatcgcatcatggagatcttgtataaaggaccgacgttacgcggaccgaagaacacggagaaagttgatacgctacgagaattcatccgtatccatcgtgataagttcttcagtcagtatatcagctttcctgcggccatgatgttcgttatcgagaatacgccaaccggtcgttatgcggatagcaaaatggaaggtgcgatcgatgctatcggtacgttgaatagtatctatcacccaacaacacctttgagcgccagaaagaaagaaaactggatggcgaaagtgcaattgaagctactgcaataccatgcggcgattttcgatgagttcatcggtaagaagaaaggtatcacacgtaaaaacatattaggtacattacatccattcaccacgcgtactgtaatcagttcgataacagcgaaccatcgttattatcatctgcatttcccatacgcaccatttactttaaccaataaagaacatatccaatccaagttattccatcgtggttattcaccgagagcagcacgtgcgttcgttgcggaacatgtccgtaattatcatccgatgatgagcgagctacacgatgagcttattgccgatacaccgttcgatgggattgtgtgtggttttgttcgaaacccatcacttgaccgaagcagtaaccaatgtcttgaaatcaccaaggttaaacgcgatccgcaggataacaccatcgggttaagcgtgatgatccttaagggatacaatgcttcagatgaggccctgccttctgaaaggaagagcttgaattccgtgaattgctgagacgggctaaagccactctgcccttatgggagccgataaggcggaaataagtgagtggatgttgggaggcttcaacgacagtcctgaaccaggatgccaccccaacgtacaatgtttaatcagcagcctagccaccgataatcggtggaaggttcaacgatcatgtccctcgaattcgctgagggtagcgcggaacacccttcgtgggtgatgagatgatctctccgtcctggtaacaccaggagctgcaggtaatgctgcgggtatgaagtagcgattcatactgaagatatgtggactttgacggcgacgcaatgaacaaccatatcgtcccagacatttggactgcgaaacatttcgggcgttttcgacccgaactcggcatgatggataataacgtaccttttaaggtatctaagaaatgtgaacaccagtcaccggttatttccactattgactgttggttcaacgaattcgtggagggcgatgacgtagaaccttatcttgacgaaatagaagcaactaacaaccattgctaaaggaggacgcctgtaatggcgcaaatatttacaggtggacgagacagttatcgtgcactgaggttcggagaaatgtcctccggtctcgataaaagctttatggagtacggccacaagctgatgaatagcctcggcggcgcaagcgaacacgtaaagcatttttacgctgaatcgttagcaacgttcgacgcattcaatcagataaactatgctgaactccgtaagactttgctgagacaatcggagaacatcttccatgacgatgtggttatgccatgtaacaccgtggaggatttccgagctgcaaacggcatatctcgacaactgatcatggcgtgccctgaattacgtacgaaggcacagcgtcagcagatcgaggggtatgctgaatgttacaccgatccgttcggcacgttcagtaatgaactgcacccggactacatgcgtgtaacagacggtgtgttgataaccgatcctaaaacagatgaaacgtggagtatttcctacgagtttgatgatcatgaactcgacctaccagaactgagtatcgatgataaagcaattacattaaccaactgggacatggcacgtatcctactgcaagttcctgatggcgaagatttcaccaatatcgccggtggtaaattaggttaatccatttaatggctgccctccccgcataaggcggggagggtttatgccgcatgcaatcttaaaattgaaaacgaggacaatcatgagtgtaaaacgtacttctccgggctaccgtcgcattgcgagcctggcaacccaagaggatattatctatcgtatcgaacacgataaattagaatttaccatgaacgatgcggctaatatctgcggtcgtttaaacattgaacgtgatagcaataacgcgatgtatgttgccgcattgtattttaatggacggctgattgaaacgagtttcagcgttgatcgctttgaggataccagtagcagagtgaaaacactgatggcgaatatgttcatccgtacgtatttacgtacacgtatttcacgttacgttggaaacggtttatcggaaacagaagagcatggtctgcgtcgcggactttataaattgcttttagaactgctgcctacgcggtatggtattacagttcctgatgtggatgatgcgtactggcgtgatacgttggactggatgctgtatcagatttccgagacgacctccgaccttcgttatacccgaagcttaaaaggaggaagctatgccgtataccgcagccttcgttataatgaacagcagcataaggcgatgatcgtcacacgtcttgtcttcaccgtgaaaagcggattaggcgatacagctaacatcgaacctttctctgagaaaagccagtatacgacccacctcatcgaacccgtcgattgtgttactgacgatcatacgctcgatcgctacgcacgacagatctggcagacgctgacgttaccgcatatggacatcggtcttcagtcgtatacgcatcgtgataggagaacacgttaatccaacatttttcacggctatattacttaagtgatgtacaacatcaatcgactgtataaggcatatcacattgcccttatattggaaattaaatcctaacgaaatccgaggatagtaaaatgactttagcacaagaaacccaaattctgtttatcctgtctctcatcctgggcgcaggtcttatcatttatttagcagtagcgggtatgcggttacgtgaagatgataaactttatcagatgaccgccaactggttattacgtcgtatcaacaaagactacgacaacagctactgtgaattactcgacaatctgtccaaagactggactcgcgcttacgcttaccctgttcgccgtatggcgcagctgagcaagaagtggttcaaagccaatccgcgtacgacaatcaaactcaacggtatggaacaagcaaaggtaatgacttggttgcttaacttcgaacagtatcctgaaaattggaaagtggccaagattcgtacaaaccgttccctggatgaagttattcgtttagcggcagagttgcgaggccgtaatgttaacgacgttatcgcagctttggtttaagtatatttgcggtctctccctaccttcgggtggggaggggctgcccattcttttttatttttgtaactttctacgaatttccaccactctatgaaatgaaaaagcttgaggagaacggaatgatccattttgatggcaatagcagccagcatttttcctttgaggtcgaacgcacaaacaataccttggtcggacgtttcggtgatggtaacacaccgttgtttacctacacgtacatgctcaataatgaacaaccgatgcgaattaacgcgaccaacttcatggcggcgttatgggtgatctacggacttaaagttgctaacagtaaatcgtacgcttacaataacttttttcatgcctggtggcagcttgagtgttacaatcgcttaaagattcccgcacctaaacatccagcggagttgtccgatattgtttatttggactgtgggtatatcgatatgcatacgcgaacattttacgcaccacgcaccaatgtatccatgcccgtcgaactggagttagggcatatgcctaactacgatagattggttggaatgaattacgcttaaagaggagttcctcatggcatcgaatccgttaccgggactgtcgagctttttaaccgcgtcgggtaaaaagctggatgggttaatgaccaatttcgcaatatcgaattattcccagtcgtattgctatcaaggttccatcgtttcactaccgtacctcattgcaacgtcgcagtatagcgcacccaaattggaagatgcgacgtaccggatgttgtatgattatttaatgcgttattacgatcgcgtggaattgaaagtccgtgtcaagtatatcgatccgacgacggaacgtgttgatctccagattggggggattgtcacagagaaaggtatatcgtacgatctgggtggtgttctgcgatccgagcgtggtaattttatcaagtggcaggaggaagtaaatgaaggcgcgccaaactaacagcaacgttagcgaaggaacggatttattggggtatccggctggggtagtggttgtaaatgaggaagagcgcattcgccgcgctcaggatccgtccatcccgaaaacacgaccggacatgtggcaggagctggtagacaatagcgagcttctacgaaaaggtttacaggagatgacgcgtcccaacatcctgcctgaatcgctgttcgttaaacatttcttgtatccgttcgcaggaatgttttcccaggatcctgaatacgcggagatgctgagtaatagcaccattgttcacgattggtgtaagatagcaggccaaccgcatcgtgcggttaacatcgttgctgatgggaataacaacaaggttctgtttacggtaccggctatctttatccggacgcgttcatacatcaatcgtgaccccaatacatgtttcctcgcgatggtggacaaagcacgtcgacagtataacttcaatcctgaaagcgctaaagcttacgtcgaccatcagcttgatcgctttgccccgaatgaaagcaaagaccatgttgttgctgattacgtgcaatggcttcggatttttgaccattataacgtacctctttatgacgttcgtgatggttcacgtcgtacggtaaaagagtgtgggttattaaacggattgaatctagccagaacctcttcaacaactgcgtcggtgggtagtagaaacatgccgtctacgacggggactattagcagcagcaacttagaggaattctgatgcgagacttcagtcgaaataaaacgcctggggtattacgtggaatcaacttgtcggatattcactttatccatcgtcaaacaccgacagtaaacctgattagccagctgcgttattacattacaaaagaagatcctgcgctgcttgatgtgattacgttcagtggtgatgtcttcgatcgtatcacgacgtttgtgacgagtgacgtggttgctgttcgtgcctggggtacctggttgttacggtatgcaagaaaacacgatattacgttgatctttcttgagggtaccaacttacacgaccagaagcaaagtcagtggttcgttgaacagaacgaggtcatggagataggagcgaaagttcgttattacgatgacctctgcatggttgatgaagactttggtttaaaagtactttatcttccagataactacagccacgacccggatgtgacgttgtcagccgtgaaccgacttattgatgagaagggatcgccgggcttcattctgatgcacggtgcgtttgaatatcagcttccaccagaagcgttaaaagcgacatgtgttcatagcagcgatgcgtataacgcaatggtggagaagacccagggatggatcgtgagcggacatattcacttacaatcccagaaaggacgtatcatggttggcggttcgttcggtcgcttggcgcacggtgaagaaggtccaaaagggtatctccgttatatgttaacggaaacgtttaacgaccagtgggaatttgttgaaaacaagaaagcagatgtctacaagacgataaaactgcatggtcttgttggagatgaaattgtccgtgtgttggaacgggaattggctccattgaagaagggtgatcatatccgaatacgctgcgataaggaagacgatgcggcgaaaacgtttcgttctatcccttctttgtatccaggcttcgtttggtcaattaaaacggacgccaagaacaaccagtcgctattaaagaacagttttgtcaataacgttatcgagaaaggtggagacttgacaaaggacaacgttaagcgtttgttggtcgaacgcattcgtaataaatacccgaacgttgatgccttaaaggtttctgcttggcttgatacgttgccatgataagaaggagttgtggggtatgagcaatatgtacgcccgcacgttaggtgattatcctttatcggtagggacgtcagcaacactatcagcagtacagcaacagccagaaacaccgatggattggttgttcaacctgcgtactttagcacgcaatttcgttgaaagctttgaagacgttgaacaacataaattaccgttatcgatgataacaggggattttcaaaacgagttactgcagctaaggcagttggtgaatgaactcattccccatattcgtttgcggatatatgcgccaacctatgcgtcaataaagcgtgtttatccgcacgctatacataaggagccacacaccgaaaaacaaaaaggactcgctacactttatcgtgggttgatggcgtctgtagatcgactccctaatatcgaatcgatggattgtaaattacccacgataaccaagacatcgtatatcaccacgcactatgtttctgacttgttggcaagaaccggttttggtgaacttattttggtggagagccataccggaaccttgaaacgaaaacatcagtggtcgaccaaacttactggtggggatcgtccagaggttgcgaaccttccatttacaaagatgacattgggaacgttcggtgaccaagccgtacagttcaatagcgggccggtgaaaataaaaaggatgctgttagatcttgcgaaacagagtcagtggaatccattaacaacggaagaccgtacacgctttggtgtcaaccagttacgtgaccccttcgcaaaacgttttctgttggacatgttccgctgaggctgtaatttttaactaatattgactatcatctgaaccagaaattgattcacactacgtaacgaggctgaaaatgagcaattggaattcgggcagtaaaccacaaggaaacattattcctacagcgtatgacgacaacaactggaaactgtgggcggacgaaaaggttgagggcggtaattcaatcccctcattgaaaattagcgttgctaagaatcaaccgcgcatcacggtttatacaggtcgtaaagaccagcagggtcgcgccgaaagcatttgggcacgcatgagttcatacgcgttctataacctgcttgcgatcctcgagcaggttgctaagggtaagccaggccaacgttttgcgatgaagaacgaaaaggttatcgacgatcgcaataatccaggtaagaagaaacagattaccgaaagtacaacatgggttggtaagaacgatgatggttcggtatatatcgctgtaaccgcgtaccaaaaaccgaacatccaattcgtattcaagccaccgcgtttccacgctctggttgatgagtctgggcaacctttacagatcggggttgtttctccgctttgtgcgttggaatttgtacgtattcatcgcgcagtgttgccgagcatcctcgcaaccaatttcgacggtgaaagccgtagcgtaagtaatggtggcaacaatagctataaccgtaacaataacaacggcggcggtaaccgtaatgctggtaacggccagtacaacggtaactctaacgcatcaagttcggcttcagcggcccctgatacccgttgggatgcgccaagcgcaaatgacgacgatgatccgtccgtagcctttgatggcttagcgttctaatcatgctttagcatcgcattctgagtcttcgattcagaaggtaacgcgaatatttccgttagtgcaaggtgtctcgcttcggcgggatgccttgcatgctgagcgataactcagccggaatccaaaattattcacgcttatattacctttgtggtagacgtcacagaagacgttttaacagggaaccgcgaaaagaggttgttatgcacatagtgcccgtcattacgacgcaaggaaaagaaaagctggatcactatctcatcaaacaccgtgatggacgtactgtggaattttcaggtcagggttacatcaagattgatggggatatggctagcaatcagatgcgggagattaacaagtatctcgcctggatagaacaaaagaacccacgtcgaattgacgacatcttcgaagggttcgttaaagcacgtgaagcgatggataactacattgctccacaacaacaaatggaggagttgagtcgcgctgttggtgaaatttacaaaccggttgtgtacgaagagattctggcattgtgtaataccccaggttgggtaaaattaccaccggacatgaaaacaacattaggtgaggatgacatacctgagaaaacctatttacgaaatgattacgttgagttaacagcgttagcgatctacgtccgtctgatggtgccgatttgggcagagtttctgattgacgcagggaaaacgtacggaacggttcgtaaagaagaagtggctatgtcgttgatgtataaaacacgcattcatgatatcgccgcttacgaccgactggaagactatatccgcgcacagacgggtgataaaaagatcacgctgtcgatgaccgtggattacatgtcaacggagaaagtgcccggctggttgcgttcacaagccatcgtccgccgtctcgccgtacgcgacttggaccaagctgtacagcctgtcgttaaagatggggtgttagtgagttgtactcatctagtaacactgatcttcagctatgtgaataacctttgtacggaacgacgtttcagcggaccgattcgcgagaaaacgccgcgagggaatgcgcaagatgaagacagtcaaggcgtgattgatgcgttgatggtgaaagataaacgttcaccacgtgtactcattctcgacattgcgtatcttacccagatggaacgtgtgttgcacgacgtcgacgaaacggcaccttacggtaaagttgaagacatgtatgcgcgtatcgcaaaacgttacgacggatacacgtacgctaaacatgatgacaccgttgagttaaaaccaatcaaccgtggatgccgagcactggcacaatggttgcttgatagccatcttccggcgagaagtctggcaccgattgaagccgtgcatcaggcaaaagcgttagcgattgcagcttgcttattagaccattggggttttcctcaactggccgcgctgaccgtaggtatccaggtcaaacgcgacgatgtttatcagattatccaccaattaaaaccacaggagatcattactgtcaataaattgtatccacacgccatgtatgaagatgaacgtacaactttaccggttgtcggtattaacatggtggccgatgcgttttgtgaatgggactgggatgtttcagcagcaggcccggaaatccttgagaaagtcccagctgaccgtaaaggattgatgctttgtccagcagatatccgtcagcagcttgtgcaattagttgttcgattaaatgaacacgtagtaaatttaagaggaaaaaataaaatgatcccgatgaatgttcgtgaaatactgatggttgaaaccgcaccgtacaacaacgtacaacgtcgtccactacgattccacgcagatagcatgcgtagcatcgaagacttcattaacacgacgcggttcggtacggcaacaacaccatcagcaatcaataagcttgcaaccggtttgttgcagcagtctgcagaacctgagggggtttcggagattgcgaatggttggggcacacgtcgtttccatttcatgatggcggtagaagaatccttggccctcgcaccaggaaccaagcgtgtccattacatttctggatacaccgaccattctgtaagcctcgatgcgtttacaacgcgcgctatcgatctgccgaacgaactggtgttcttcttcacgaacgtaatccaggtaaccgaaacaaccacaacggatatgttcggtaagcaaatcgttcgtgcaaccccgatggacgcaacgaacctgttgaccggcgcatacgaccctgttaatcgtgatgttcagttcagtactcgtgttcaggatacgctgacctatgcatcaacagcacgttgggtaggtaatggtggttttgataaccagttcatggacccagccatgcagaacgtgatgcaacagttcgatccagcctacgctgatgtggttcatcgtacatcctatccaccgcaaccggaaccggttttccgtggtgtggaagcagcaatgtgtttcgcaacagagaaaatcaaacccgctagtgccgatacgaacatcccaaccatctatctgagaaaagccttcgataatgttggcgctattcgtcagacgtacgaaagcgggtctcatccaggtagcgcagagaacgaggatatttacgtagaagccgctcaagctgttcgtgaagaaccgctggttgcacatccggtattcggtgcgattatgcgtgatgaagggttcgctttcagcggtagcctgagttgggctgacatgaaacggatgttcggtgaacatatccgtgacgtcttaacgttattcccgtatgtggaagctcgtcgtggtacatcagcaaccaccgagtttggttggatgccgaccgacagccagagctgggacgtgatcgattatccaacgctgtattgctcatcgcttgctgcaatgatgcctgctgcgatgacgtatcgcatgttggagtcgttccgtttcattgctgacaaccatggtcacccagaactcggtatcatgcctggtcagtgggcggttgcggttaccgacgctgtaccgttcattaaaggatacgattgtaaccgtgctgctgaacaaatgcgttctgacatgattaccaatatcctaccctccatgttgggtaacaacccgaatgcggttatggtgagcggcgcgattaacctgttcctggacagccagttcaagatcagcgttgacggctctgcaccgattccgtacaccatgccgaacatcaacccatctgcatacagcccgctgctcaaccgtagccagcaggaggtgtataagctgagcgttgatttgtttaacctggtggatgcggtaactaccaaaggcaacttctaatccataggtcccctgttgtagggggaccgttgacgtaaagaaaaggaaatacaatatgtcgaagcttatcgaagcttatcgcaaagcactacagagcgttaactattttgagaatgacgcccacgaattagaatatcgttttacggatggggatggtaaagttgttgcagttgccgctaccgtggaaagcatgccgttgctgatgccggtttctgaagttcgtaccggaaatcagctggctgaacgtgtgctgttccatccgctaagtgaagacgtgatgaacggcgaatcggaagtacttcagttcctgcgtcgtgcgatggttgttcgttttaacgccacgctatgctccatgctgatttggatggttgaaaccgcaatcaatcctaaagaagcaaaacgtttcggaccgaagcaaaaagagttcttcaacatccttgcggacgccagcgataaaacattaacgaccctgggtaaactggtcaccgtttggctgaaacgcgacacaccgtatacgctgtccaaaatttatcttcgtcgtaccggcgcaacctacatgggtaagaagatgacccgcgttgcggtcgttactttcccgttcatggaagaagaacatatcagcacgaaagataagaaaacgtattggtgtggtgttgagatttccaagaaagatcttaacatgctgagaaacctggttgagtacgttatcccgcacgcgggtgaggtaagtgaaacgtacaacgctgggtcaagcgatcctcatgctccgtatttcgattgtcttatccacagcttcgctaagctgatggaaccgctgaacaatctcatcaaactgtttggtgataagtacgacggtaaagagaacggctactgtgatgttacttgggttgaggattttgaaccgatcaatcaacatcgtggtcagattccgccagcgaaatacaacatgggtgtaacgctgaacagtcgtccgcagccgacggttaagccaaatccatcagcagctgcacatgaaggtatgcaaccgcgtcctgcttcaacaggcagtgtgatcgataacctgttaggtaaaaccgcacctgtccaacctaatcagtgggaaagtggtggtaaccaaccggcaggtaatagcacgtttgatgcgttgatgaaccgtgttgcggaacgtaacggtacgatgttcaataatgctgcttggccaggcatgggcatgcaacctgctggatgggggatgccgccagcaccgcagtcgccaaacggtttacgtcgtcgtgctgagatggaacgtaacaacatcctgagcgcgtggacaggacgtactgtaaatcgtttctgatgtattaagtcatcgaacgacggtataaatgccctccctacgctttacgctgtgggagggttatcttaagcgctgtagtggattgtgcggtactgttgttttaatgtgttgattgcgcttgtatcgacaatcttcatggttagaacatcggcggtgtattccgtagggtcacgataaccattgagtctcatggttatccagtgcattggttcactgccctcgccaagcagaacacgacacaatccataaaagttaccatcgaattcgtaggcgcgttcgggtggtatgtctatcgtagagaccagtccggcatttttgaaatattccagatgcatctcaacaacgttcctgaaatcaagatcgtggatgaggtcatcggggtttgtcttaagaaagtcgttcaggggcgtgttagacatgacgtacctcaattcgataataggaagtcctatgcattataaagaaaaacctctttatgaatctgtgaagcaggcaatcgctgaaggtaaaatcattcccattaaacaggagtatactggcgtagggactggacttaacgggctattgcattataactcagcacagcgcgctgcgatgtttggtggacatcttagccaagcgttggttatcaaagatgcgaaaccgtcccgactaacgacggggattgaataccagtacggacagaacacttggtcagtagagtttccagttgaatctcgcatcatagatatcatcccacgtttccaacctgggcatacagcaaacagcatcaaaacaaacacgatgcattacgtgctgtatgaaaaccaagaggatggtaaccgtcacgagctacgcttgcttgaagtgcccgagcatcacatcatgcatcagcagtacggtttccgttttcgaccaaccaacttgttccattcccttcgtcgaggccagatcgtaccgcgatattctcgtttgatggaaagtccagcgatcaatcaagaaacgcgcgagtggggttacggtcgcgattgcaaagtgtgtttcggtagcttctatcagtgtatcgaggatggtggtgttgcccgtcgtggtgtattgaagcatttcaccagtaccggcattgagaagcggacgatcacatcaggtaaatcacgatacccaatcaatctctacggtgatgatgaggtatatcaagcaatacccgagaacggtgagcgtattcgtaaggatgggttacttgcagcaacacgcgaaatcgatcctatcctcagcgttgttgacatgatgacgtgtaaccttcagcgtgtggattatgtttacgatgatctcacttacgcggaaccgaatgcgcgtgtaacggatatcgatgttgtcagcgaccgacatcgtcgttctggacgtcaagcccgcgagcgtgcgattatgatggaagagaagatgcgtcctccgtatcgtcaattcctgaaatacgagaacgcgattggtttgctttacacccgaattcaggatgctgttcgtaagtacgaacgtgaacgcgttggtacgccgatacgtcatcatcaaacggtgatgtggtggttgaacctggctgatgctgaacacggtattgatatccgcaatcctaacggacagctacgtcatgtgttaccgacccgcgattaccgtaaagagaatctcgatgattggcgtgtgaccatcacatacacgtacgacgttgttccaggtatcgggtttaaattcaccggtatggcgggtgataaattcgtcgtaaccgacatcatggaagacgatgaaatgccggtcgaccaatggggtaacgttgcggacttcatgttcgacgatagtacggtaatcaaaaggatgagtttaagtcgtgttaacgcaccgtacatcaacggtgttggtgatcagatcatgcgtgaactgaaaccggtgatggatgcaggcgatctggagaccgcttggaacacactgatgcgctactactatatcgtcagtcctgaattcgtggaacaggttgttgaaaaatactgtatcacggatgaggataaatgggatcatttacggtacgtacaacgccatggtacggaagtttatatcccgacggacagtatcgcagcaggttcagaacgtatggagaatctgattcgtgagttcccgttgaagaaaggtcctgtacggtatcgtggacgttctgggcaatggcggacaaccaagaacgatattgcgatcggtgacacgtacatcatgatgttggagaagacggcgaacgactggtcagcggtgggcatccctaaactgcaagcgcatggattaccgtcgaaactcagtaatagcgataaatacagttctcctggtaaagagcaaccgactcgttactgtggcgaatctgaacatcgtgaagttaccgcctttgctggcggatggttcgcgagcgtctttatggattatgcgaacaatccaaaacaggtggatagcatcactgaaagtatctatgcgaccgataaaccgtcagcgattcctattgcaaccaacttcgagaagtatcccattggcggcaaccgtgcgttgaggatcctgtatcatcaactgaacgttgctggcggacaaatcatcgacgcagatgactgcgaaagctaacgaggtatacgatggatcattcggatagcgtgatagcaatgattacaccacatctgttgcgcaaccttccagcaccgaacgtcaaaacgaagaatcataaccgtctgcttggattatatcgagactggcgggattctgaagggttgacacggatcgcgaacatcgatgcggcttatgatgcatttcgtgacgaacacgatgaaaacggtaatcttaagcccattgcagcgcagttacgtaaagatgtcggcgatgatgaagttcgcgatctccgcatctgcgaagaggttgctacgaagaccgctcgggggttaatgttgctggaactcttcggtgagcaaggccgtaccgaattgcggtctgaacttatcgcttgcttcgaagacacgttgctagaatttaaagatcgtcctcctttctgatgcatattacgcctcctcctgcccatgtggtgggaggaggatgtttatgctgataaaaggaacggtttattttaactgcttaacactagaatgtgatgacttaaagaggatccctggtatgagtgataacgaaaatcgttccgtagcagtgaactacgttaataatttaatcttgcaagaacttacccgcgatgcggtaagggcatcaaataagctaggttttatcaaccaccacggacacatcatcgatattaaaaatcctgactgccagatcgtcgacatacgcagccaggtcgaacaagtagctaacgttatggttaaagccgaatactggctagaaactatgaaagagcatgttatccaaccccaacaattagatatcgacgttgatgaaattattgaacaagttgaagaatcgttcaatgaactcgtcaaccatcgtatcgaaaaagttttaaacgattgctaacattcacctgaggaaaaaacataatgaacttaattcgcaaattaacactgcaagaacttgcccgtccaatcggtattgaagcagcattgcatgatgaagatagcgatgcgctacaagtcgccgtgcttacagcgaccacgaactatgctgttgatgtaggcaccattgaaccggtacgtagttttgaagaagatgcaaccgttattgatacagttgctcaaaacgtcgcgcaaggtttggttgtgcttgacctggctggtgatgccggtgaagaagcgctgcgcgaagcgatggctgattacgctgccaactgggataccactgcagtgcagaaaacgttcgacggttccgaagaggattgtgttgaagaagacagcatagagtaataaacacgaatagccctccctctcccatgtggaggtgggagggaactatgtcgttgtttttattttccgttatttctgacggaaataaagcaatatatgcaaaggcaacgtatatccaacatgtcatctatcctaacgtataagaggaaatgagattatggagatagcacacgccaacatatacggcgatggattaacggtatatgaagaaacatgggcggatgaacagattgtttggcttaacggattcagtgtcaaaaccattgaggatccagcgttaggcgtcgcatatgcgtatcccaccgacacgttagaacagctatttcaggatattcgaaatgatctcattgaggtggaaggtgcggatggaacgatttatggtcgagtcgataagtttggacgtgaccttctaggcgatcacccaaacatcattcgtatcggtatttatccgtatccgacattcccgcttgttgatggagtttatgttattcgaccaaagttagtcggtgaagaaaacgtatatcgcaatgataaagggcttcgtgtaaccgaggtgagacagataaaggggtttattctcaccgtttttgcggatatgtctgacgctatggatccatacgctttacaacagaaagctggataatgctgccgacataaaggtcagcagtggagatatattaacacctacataacctaagggaagggattcccgatgctatcacaacgatagtaaagtccaacggatttggtaaaccgtatgataaaaccatttaaatcggaaagcaataatgactacaacacagacgaccaccacgaaacgtcgtgtgagggcacgcgagcttatgcactggccggttgatgaggtattcgagtgggcacagcctaatgaccgcgtatatatcgagatggacgatggcgttcatgaattacgtgcgcgacgcattttctttagttacatgcactggtctgtgcatcgcatgtatcctgagacaccactgacaaaagagaacctggttgataaacgcaagttcacagcgggttcatcggttgcgttgcaaagcgccgcgtatcgtcaatgcatgtatgcttacccacaagagaatcgtgaggttctctggaaagcattgttcgatatgtttaacaatgtgtataacttctttacgtatgcgttggaggaatacgtaacaacgatttgcgcggatgatttttatcagattactgtacaccccgaagttaagaaaatcatcgccgaagcggaacccacccgtgaaggtatcgaaagcgcatacaagaaactgaccaaggtactgagcaccgataaaacgttacatgcaaaccctattgcacgtgcggtaagaaccgaacacgtttcgattgggcaggtgctacagtgtattgggatgcgtggattcttgactgatattaactccgagatattccgtgatccagtaatgcggtcgtacgcagctggtttgatctctcttcccgacagcttgaaagaaagtcgttctgcggcgaaatcgttgctgttcaacaaagagcagattaaaaagtctgaatatttcggtcgtgaacttcagatagcgacagcggttgtacaacgacttcatcctggtgattgtggtagtaaagagaccatcccgatgccaatccgtgatgagaccgacctgcgtggcttccatggtcgattcattattcgtgatgacggttcgttggtagcgatacaaccacacatgaaagaattgattggtacgacggtacgcatgcgctccgtcaactattgtcatcatcccgatcctgctggggtatgtacgacgtgttatggtgaattaagtcataacttcgcactaaccgataatgtcggcgatggcgcagcgcgtacctgttcgcaacaggtaacgcagaacattctttctaccaaacaccacgatggttcgtcaacggtatccacagcaccaatcccaccggaatatcaacatatccttcgctacagccagaacatgaacgacatcaaactcgcacgtgagctgaaaggtaaacacgtgctgattaagatgaagttaggtcttgcgaacatgttgtacgacgtagccgaagcggaagaaattagttcgctgataccgcaacgtttgtttaacatgacgctttgcgatatggagatttacgacaggaaagatgaaagctatcgtaagctcaaagtcaatttcgatttctgcggtcgtcctgttgtaccgagtaaagcgtttatccgttatctaaaacgccatagctgggaagtgacgtctgacgggattgtgattttcgacttgaaacattgggacaattcacgtacgttattccagatgccgttaatccacaaaaacatgatggaatacgcaaaagaaatcgaacgtgagttcaaattcgggaaaggttctttcagtgccggattcctttcggaagacgaagcaacgccggaagaagttgcaaacgtgctgtattattggcatcgtctgtgtgcccagcgtctgcgaatgaacctttcgcatctcgatgttattctctacgccagcatgattcgttcgccacacacgaaagattatcgcatgccgaaacagggaacaacacgatacttcagtaccttcaagaagaacatgaacatgcgctccttgagtatgaagttcgctcaccaagagcaactggatgcgttccaaaacccgaacagttatatcccaaccatgaagccggatcatccgatcgactacatgctgttaccgcgtaaagaacctaaaccggaggatgtaatcacgttatgaagttagctcgtatcgacgtcttctcgcatggcatgaggctgagcggatacggacttcgatttgcccatcttatcggccattaccttcgagaccgttgtttgcatctgaggaaacggcgtgaccctcgtacacggagaatggttaccgataccataaacacgtatgccgcggcaagaagcgattatagcgaggtatacttactccgtgaacagttgaaatcgtttttggattttatcttttctcgagggatacgaaaagagtggttggaaatcgtctatcacgatccggtaccaggtaaagaagtggagttcgtaaagaaatggaagtttccatggcgtcaagatcagcaagaatggttggagtacatggacgggggtaaggatacccccttcagaatgagcctaaacaccgctcaaacagggtcaggaaaagcaattccgcttaatacacctgtgaaggttccaggcggttggaagccgattggcgagcttcagttaggggatcaggttattggtgcggatgggttaccgacgaacgtaaccgctatatttgatcatgacgatattcagctttatgctatcttctttgaggacggtaggatggttgaagcgtgtggtgatcatctctggcagtgtactgaccctgataaagttctcagtacggacgaaatcatggaatgtatttacgacagacctgctcgatctcgtccagtaagaatccgactttacgaaccgaaagaactcgtcggtctcgaggaatttaaggcggtaatcaaaggtcgttgtgaactgagaatcaaaaacggggaagctcaccttgcggtcagaaccgtcaattcgcagataacagccaaggtctgggagttggcttatcagttaggaggaattgcgtataaataccccattgatagttacataatggtgacattaatttaccattccgatttgcgtaagcttattcctgacgacattgagattccagacgatctccccgttaaccgacttcctggtttagcgattgatagcatcgtgccgacggtgaaatcgaaagcacgttgtatcacggtggacaatgacgaaagcctttatgttattaaagaccacatcgtcacgcataacaccgcgatgtcgcaggaaatcgtgtttaggcggggtgtacgcacaggtattatactttctccgcggtatatgccaggttggcgaagctcactgctgaacttcttcgggatggaaccaggggatgttatcgagatacgcgggaacgctaaggaggatccaccgcatcccgacattcctcgttacagtatgttggagtttcaaaccttggttgaacaaggtgaactcgacttcaaaatcgcattgttctccttgaacatgttccaacgttatattgcggactacgagaagaataactgcgttgcgccatatgccttccatcccgccgagttttgggaaaagaccggcataggccttctgattcatgacgagtgccatgaagcattgcatttcttgtttaaggtcaagtgttacgctagtattccggaaatcatctatctgtcagcaacggcggtgtccgacgatccattcatcgagcggatgttgtatttgatgtatccgaaagaagcccgttatgcaaaaggcgaatacaagaaatacattgcggtaaatgccgtgacgtatcgactacgcagtacagataaagtcagatacaaaggctttgggggttcttattctcacacgatattcgaacagtctatcatgaagaacaagcaactcaaactcgcgtactttaacttcatctataccgttataatcaaaggtttcatgaaccagtatcaggaaggtatgaagatgctggtgtattgtgcaaccgtcgatatgtgtaagtcgttgtcgcattatctcagtgaacgtattcctgagttagagattggtccttatactgctgaagaagatttcatggtcttgttggataacgatattagcgttacaaccgtgaaatcggcaggtacgggcatcgaccttcctgacttggtgatgacgttcatgacgttagcgatggggtcacgaaccggtaacattcaggtgttgggacggctacgtcagctgaaagggaagtttgaaggaatgacaccaacgttctggtatctggtatgtacttcgatagaagcacatcgtaaataccatcagcgcaaggtggagttcttcagcgacaaagtgcttacccagcgcgttatcgatgaagattttgaattgtaacgatagcgtttggtggaatcaaaaatcaatgaagggcctcgaagcaggcccttataaccggagcatgtatgtcaaaagtaagaggcgtgaaacaaatcgccaatttaatgatgttaagtggtgagacacagcaggaacgtgagttggtcttctttggcaaactggctgaggatggtgttgaacgtcttcgtcaagtagcatcaaaaattgaacatatggtgcaacatcaatggttgtttgataacacggccgttggtggtgtgaaaggtcaagtacgagcacgagctatacagatcgataacgaagaaccgaaatacatcatgaccacgaaggtgtatcgtggtccaggtgatgcaacggaaagcgaggtagaaattccagtcgagatgtttgatgccattgagcgtatggctccggaaggtcaagcgaaaacacgttacaccgtggaaagtccggacggcctggcgtgggaagtagacgttatctacacacgagatcaccaggttgttgagtgggcaaagatcgatattgaaattccggctggaacttctcttcgtgaaaatccgactttgcctgaagcgttgagtggtgttttcgttcagatgatcgatcgtccccacgcaaaacgtacggatgaagagaacgctattcttgacgatttgttcaagaacaaattcttcatcaagaacgataaggttgtagcgagcaaacttcctgaagggttcgatcgctttgttgatcctaaggtcgtcatcgaaatgttgatgcctgccatcgagcctctcgtaaatatgattccagcattaagctacaacgagaagtattttgatttcgatgaagaaggtcagctgaaaagcgcgttgcaagaactcaagcatgccgcactcggtgtcttacgtttaagtaagaaagacgtcgaagagtgtgattgcgaccaagataagaatggagaaaatgaatgaatatacaacaaatctgtttaatcgatgatcagttcagtgaaattaacggtgagcgttacaatgttgtaagctggacgctttcgatggttcaggctgctgaacaattcccgatggataaacataatcctgaagcgttccgcgatgtctataaacaaactcagctggctgaccgtaaactacccgaaggttacggtgatgataagctgttggaagatattaagcgtgcgttcgccctgcacatgctcaccttaaccgaagacgatcctttagaaatccccgatgggtggcttatctacgatacggaagcctacttcatgaaagaactctggttctaagtcataacgccataaaaccttcctccccgcccgttatgggtagggaggaagatatgctaactattttttttactggaacgtcggtttatgttccgtctgccacgagaaagcaccactatcgtaattgtcgtgggttactcctgacggtaatcgccacccacttaaatcttggttaaaactgttgcatccgttaaacataccaccaatgtcagttactgagctgacatcccaggcagctaaaggttggttaaatttagtgcatccgccgaacataccattcattgatgtgatgttacttgtattccagttagagatagacggatcattcaaattcgtacaactttcaaacatgctgtccaacgttgtccacgaagttgggatctcatctggaacagtcgctaaattatcgcatccaacaaaattcagagctattgttgaagtagtagcccagtgaattacttcggttatctcactcccagaaatataatttggtcgcagcacatctgggtccgtacgagacacaatttcgatttggtactggttattgtcggcgtatgtgtggtgcgcgtatctttcttcagcatccaacgttactttattcccatcaccccaatcgatacttatatctttcattgtgtttaacgttagcgatacgtcaccaccattcgtaaacaacctgaacgtgttatcgggctccgggtatttatcggatttgagcgcgagaaccatctgaccgcgtaaacgtccaatttcccaatcgtctttttctgttgcaacacactggatatcaccaagagttattaccgtggttttattcctgttttctgcttcatcgtacgcttgtaaggcggcatctaattcatcgccggttatgtcaccatatttggctagagtattaagaacgttaataaattcattaacgatatcttcgttttcaaccatcggttcatttacgtgttcgttaacaagtgctgcggttgctaatagtaacgaaccagatgtgtcagcttcaacaccatccagataaaccagattcgtaagatcggttttcttgatgatagtaatcaagcttaacgtatcgttagcaatattgaactgaagattacccgcccaaacataagacgtgtttgcaaccggaaccgtaatgtctttaataccggtgtctgcgaacgtaatttgtttattcagctcggattcgaggaagtcgacggttgtgtcaaataccaatccgtaacgttcagcaatcgtattgatgatatcccttacagcggtatcttgcttaacgataacccgtaacgggatcccggtgaagtttttagcgatgtctcgacggatgtaggtcagagactgctcgttaaagtagcgactattatcgttcggtttgattgtaacaacgaccgttccaggcacttcgcttaccggtgccgttagttcaaattttacatcgtctaatgtcagttgtaaactgtttttgctgtttactaacgcgagaagttcgtctttccagctttgtttgagtttcatgtattttgccctattttaataattacgacgcatatacgtcatacgatcttgcaacaaatacagcataaagctctgcctgatgtcaggcagagcttcttaatcaccattccaagaacgcaggtcgtggtttaatatcgtattccgtggtgtttacggtaacgtattgatcgtatccttccatcgccaacgtttcctgcaagttaacagcatcttgcttgttcaccacgtatttgacgcctgtgatttcttcaacaagctgtcgacttaactccatgatttcgtggctacgtgtagaaacgttaccctcgcttcctgtatctaacatgaaacgataaatccgaacaggttgcgtttgccctacacgatcgagacggctgatggcttggatttcatcggatgaacgccatgggttgttcaagaagagacccacgttacacatcaacatcggaaccccttcggctaagctatcaaatgttgcgatagcgggaccgctgtcaggatcatcgcgtaagcgagcaagtatctggttgatgttcttgttggtcttcccgtaaatgggttccggtaagaaaccggcatcgcgaagcatgttgtcgacacgctcaaccacctgaacgtacgacgtgaagatcaacaccttggcttcagcgttattgatgtacccttcgaagtcgatgtactccaccatgtcgacatgacaccgaatgcgggctgcacctagaacacgcgccaacgcttcaccctgaattttcaacccaacgtacttgatgacgctcttggcgtctttgaaagcaacccttaaatcagaaggaagaaccggcataatagaacgtttttcaaacgcgttgcagaacatcgcatcttctttgtctctgacggggtcgtaacctttctggaaacgagcaacaatcgattcgtatcgagatagctctttacgttcaccatcggtacgaatagtcttacgatagtagtccaaggcgtcatcaaaaatctttctgtaatgcccccagttatccttgtaatacttcgcccgatcgcgtacgaatatcgccatgtcgtcgcggatactcgagatggtataatcgctaccgttagggagcttcacgtaaacgtcctgaacttccggccgggttttacgataagcctctttaggtacaacatgcatcatgaacccaagacgatgtctgaggatatcgttagcgcggctgctggttaaaccgtaaattgctttgaagctatcgaccacctgtccttggaacatcgggtcaatacaacctaaacaggggatcatctcagaacccatctgtttaacgggcgtacccgacataaacaagacatgcacatccgcattcatggtctgacgcatcgtctgtacgagatcaaccagtcgttgggaacgttggctgttcttgtcgttgaagttatggctttcatcaaccacgatcaacacgcgcttcgcggtgcgtttatgcttgatcattacatcgtttaataaacccatcgactcgtaatgcagaaaataatacttatcgcttttctgcagctgtgacggtggcattgtatctgaccagaatgcggtttctgttgcggggtcaacgatggctttgtttacatcggattgccatgctgaacgcatggtgttcttaggacagcagaccacaaatacgtcgacgttcattgcggcgcttaaagccaacgcggtgattgttttaccggcacccgcacccatcgcacacacgtatcctttcagtcgatatttaggtacgttacggttatagatgtcgataaactcatcttgataatcgaacagggagagcgttagcattttgttcatgcgtgctttatcgaggattgcaggttgctcgattgtggtattttgcaaccaggtttcctgcagcagtacctcaataaggtgtttcagcatgcgtttattactgcgagtattctttgcctcgatgatcgtttcgagaatataaacgaaatcgggaaggtaaaagttgtggagactgagaccactggaagagaaattacgaaacatgtgtttcataaatcgggaggtaccccatattcgctgaatgtcatctgaaagacgccaggcatcgatacccccgatatgcacggtattgttactctgatttttaaccgctattcggttcattaaacgattgattctatccaacataatcgcgctcgatttaatagaatgtatgataaaaactcctccccacacctttcctggggaggaggccggggatgtcccttaaaatgacgtcattcgacaatccataaaatacgatgggtatcgaaacggaccaacacaaatcctttcacggctatattacttacgtgagtaaagaaaatttattaatagattcaaagaggtacgtgcaatgaaatctttatattcgttggattgtttaaatttcttatctcgggaaactcgcgctgaagtaattgaaaatattcggaagaacgatcttgcacatcaagaagaacatgtgcttgccgttgttgaactggcaaatgaacttgctgatgtggttgggatcatcagacccacggaacgtcgtcgtctattaaccgctgcatttatgcatgatatcgcttgccacgaaaacagaacataccaccaccttatcgggggtattcgtgcatcggttatcctgcttcgtaacgagcagcatattttcacaccggaagacatcgaggagatacgcgtacttattgctgaacatcgtgcctcgtattctggtccacgtagttcggttgcctctcaagtgcttcgtctggcggatatgggccgtctcgatagcgaacgttttggtatccgtgcaatcgaacatcgttacggccagatgagcaaagagttcgcattacaggaaaccgccgattatcttatttctaaatttgcgcctgacggctacgcttggattacctatccggcgttaggtcagcagctttatatgaaagagattgcgatgattaaatcgctctgtgcggatcgtgataaactcattgcttatttggatgatgtttatacgtatgttgaaaagaaacatggtgaaatcatgtgttaaacatgaaagcggagaataatgaatgagtatcgttgatttaacgttaacagaagttggtgatggtattgaggtttcgatgaaaacctccgacgatcgcaccgttgttgctaaactggaagaaacactgtacggcaattacgtggtgggcgtttcaggaaaggtgagtatgtatcgcctggctggtattttaagtgtctttgacggaggattgctgccgtccgaccaactcgagctccagaacaaattgatcgacaatgacttctacacggaaaacgtgaaagtctttggttacagcatgatgggtggcgtatttagcgccgcgacgaacacgcttaacttcggtacccaacaactgattcagttcagtatcgaagagggtaaactgaaaacagagtggaaaggtagcgctgcatacacgccaaccgatcttctgcttacttccgcagaacagcatttaaaagcaagtaaatcgggtcgtgcatttctggagcaattagatcaatgaccccacccatcttctttatgtcggatacccattttgatagcgagcgtacatggacgtattcacgccgtccgttcgcaagcgtcgccgatatgaaccagcatatgctgaaagccatcaacaatcttccaaagaacagtgtgttatggcatttaggtgattggggtaagttcgagttcgtggaagccattcgttctgatatccaggttcaattggtaatggggaattgggacgaagacgcatacaaagtgacaggattaagcttcgaagcgtggcgtgataaactgctcggtatggggtttgctgctgtttatgaacatccgttggtgttgccgattagcaatgacgaatcctactggctatgccataaacccagcgaaagaaacccaggctactttaatctattcgggcatattcatcgttgtatgttagcgaaggccaacggacttaacgtcggcgttgaccaacatttttacgcaccgattaatttggacaccgtacgtttttggcgtaatgcgatagaaaatcattacgacgaagaagtatggatggagtaatcgtcaaccgccctcccttcggggagggtttatgctgcgttaccagcacctgttaaggagataaagatgtctcgatcatcgacacaccacgacccctggaaacaatttcttagagagcttcattatcatgttgcagctcgaccaggcttgagcgcacaccaaatggaaatcgtcatacaggcgttaatcgcacgacaccctcaagttacacgtattaaatcattcattggatctggagagttctatgcttgcaaaaactattttagccatcgtgaccattacatctacttctattatcgcgcggttccttcgtcgatgacaggtcgcggtgtggaattttaacgcacgcggctatggtaaaaattaacggtttttcatgttcgtataggacatgaaaacaaacaacaaaggcgttagaatgaagaattccattgttcgtcacgattcggatcgcgggttttttatcgatacggatatccttcacgatatttatttcaatgacgatcgtgaattagccgagcttgtagaacaacgctcggagacaatcgtcgcggctggaggaatatttaaacctcagcgatgggaggggcttgatgttagtatccgtcccatcatcagccgagaaacgccttttgaattactctttattttctcaccccgatcgttacccgatgagcagccgacaacgttatccttaacggctgaagttggttattggtcgtaccatatcgaacaaaacggtgtggtatgtgagggtacgctcgaaccgtcagaattaaagaagtttcttggtgccatcaaagaccaagaacgtaaacgtaaccgtgcaatacggaaacaaaaccggaattaatttattagcaatctcgaccacagaaatcggtcacttttaataggaatcgaaagaatgaaaaagttatttcttgcggctttctttattacggcatcagcacatgcttgggattatagcgaactggaaactggacacgctaaactaggcacgatgtatacctggtcatcagcagaagtcagtgcaccaaccaccctggaagttaactgcttgtctacggggggcgcgtgggtaaaactggatacggaagatgaaggttatcaggcacctcttcttcgtgactatccgggtatcgttaaaatcacgattggaaccgctgatggaatcagttatttcaatggagaaaccgatcttaacttctggtcgaagggcggacaacaacgtttggtgaacttcgttagtgaattgaaccaagcgttgaccatttcggtgttaaccgatgacggcaaaacgtatcgcgttcgtccgatcgagccggagatgcggatcgatgtccgtaaatgtccagcgggtgtgccagcaatggttgatcccaacacgcgtaccgtacgtacacctgaagaattgaacgcactttaacatggaggaaggtggatgggtacacccatccaccttcacgaggctattatgacgaagaaaccaaagaaacgtaataagagatacaatccgaataaacgttcgaagtttacgctggtttacatgacggacactgagttccaggaagccaatcgacgtcatcgttgtctacgggaagcttacctcaatgaacatggctctaaggttctaacggctgctgacgatgttcctgaagaacagtttaccgatattcagttattcttatcaaaaggaattcaataatgaaaacgcttattgatacgacatgccctcattgcggacatgacatttcgttggcatcgattcgttacgatatgttttcggatatgccgttgccgaacacgtgctatgtttgtactagctgtttgaaaaccgttaaggtatttgttgtcgataatagcgcagaacgccatatttcgtttatgccatcggatgaaaaacacgaagcgatttggtcgattattttctctaatacaactcgcccaaccaatccgtttgtttccagcacatcgatggctgttgatgtcgattgttttatgtctgagttaaccttgggtaccgtcgaacatattaacgcgatcgctgatctttatattggccagtcgttgaatcagggacatctgtcaccaaacgggactctctgcatcgaaggagacaactacgaagaggcaatgtcgcattaccgcacgcatctgacgatacccatgcgttacattagcgatattcaagaagccgcacttttcgcaaccgatcttgcgtggttatttaatgcggttattcatcaagcaaatgagggtacgttgctgcagaaagttgatggtaagatcggctggtgtcatagcgtgcgtagtgcggttatgatcgattacttattacgtaatcggtggattgctcaactgtttaattattggtatcaatacgtcttggattacgacgttgagccggttctttacagtgctgatggtagcgtctggttgtcgcacgggtttgttaaagggttggatgttgatgaacccctgttcctctatccaagaggatttcgggaactaacgtttgatgaggcaatggaactgttaaaacaggataaccccgtcaaccaccatgaagagaacgctcgtcgattcagtcctgatcgtaaagcgacgaatctgtccgacagcaatgcctcgataattccagcagatcgtgtcttgcattaacaaaggggtctcggtgtgaaaattagttatcaggaacaggatcatcgctgtaaacactgtgataaagatcttagtaaaccgatgcttgcagcatacggtcaacacgaaccaacggtggtatgtgatgactgcgcaagccgctacatactggtgcgtgaaggagacgatgatggggtccaacttaagttacgtgatacccatgaatatcggcttcgcgttgttgcggtattggctccaccgtaccagaagggggaaccccgtaaagcagcatggacattcgcagagtttgatgtaacgcttgataaaccgattacgaaaggcctttcaccgttcaatgatatcgttgagtataacaacatcaaaaacgcggttgctgaattgctcccattgtcaccacacagttgtgtctatggggttggaactctaccgcaggtgtgttgtgtcttaccacgagaaacgtatatggtgttaggtgtccggcaactgattaagttctttggggtatatgacgatatgttgagtaagatcggcgagcttctggtcaacatgtcgaaaataaaagatgttagccagaagaacaaagatgtgcgcatcagtcatgcgatttgtgcgcatctgatggcggggtcgatgtggttgggcgattacgctaacactattatcagtcagctatcaatttcgtacgaagttgtgtttaaagatggcgtgttctacggtgtgcgtcgtaaagatacgactttccagctgaagaaaatcgttctcgacctacctatcgatcatcttatcgccaatgttatttctgatccatcacgcgttgtcgacatgatacgtggaaaactaaaaggtaacccagcatgaaacgactatctgcaagacaggtgtcgttgtgttactacggaatggagtacgatgccttagcaaaattgtttcgtcagtatcttgaagatcatcaccttaccaacgatgatctcttttcttattcttatttgaattacccaattaacatgatacgttattcggaagctgaaggtgaatacctggtggtcgcttctgttatgcgttatctgttaattgatctatacaaacgtctatttctgccgaagagactacgtatgcaagaaacattaaggagacttcatagtgagcgttttacgtgaagcgtttaagttcgttgctggggaacagaccgatgatgatattcggcgattcatggcgtatatcgcaccgctgagtcacgatggtgtcccaggacataatgtgttcctgccgttgaggggtgtttcgacaacagccgcctatgtccgtctgttaaccgagatgttgcggattagtgagcatcctggtggtaccaaccgtgtcagtttgaaagggcttgctgagcagttatcttacatgcctgttatccgtgagaaaccatcgtgggcggaagaacgtcgcgcgttaaccctgatacgcaatctggattctgatgcttggcgtgagaacctcatcacgtatttgttgatcatcaaacgtcgtcagaaaccagcgaagagtctgctcatcatcgatgataacgacccgaacgttgatttggttgagatcacacgagcaataagcgcgttgaccggtgaatcaatcaatcctaaacttgaaccgttggccgcaatccgtcagatggtcgccacgctgtctgataatactgcgtttgtcaatatttgcagcgattacgataaggaaaaggagggtatacgatgatagacagcatcgaacttaatgaagagcaaccgttatcggtcgtacaacaacttttagcgcagcatgagcttgtttggtcggaagagcgctcgccatgtgaagaatgtcgctataaccacgttgttgctgagaccgtttttggttctctaactatcgaatggaaaggttggaaagactatacaagctacgactgcgatttacctttcccagtcaacgatgagttttcgcacatcaacgcagatagtttagatgaggcgaaagcaaaagtaaaagcttggtacgactacgtgatattagctggacttggtttggctgctaataaaccagaactgaactaatttgatttcgatgaggtataacaaaatggctttaaccatcacaattgacaataaagaacttaatcccgcagaaacattaatgtacgcggcgattgcgactttacctaatcttgacgttgaaaaactgtttaaggtacacggcagtgacctgctcaacattatccacgatcaaatcgaaccgataacaccagaggaaataaatggggacaaagaactcctcgaagaaattaaaagaggagagtattatacgtatcacggtttcatgacgttatttcaggaagatacgtcgcatcttcacgagataacattacggtattatctgcgctgcgctattatccaactgatgaatcatcgcgaagaaacgcataaggcgctagctcagtcgttccagggaacaacatttggggctccgtataaaccgttagatatcgttcatcttttttactcaattggtcgttatatcaaaaaccaagagttggtgataatcgagcagaacgaccgtgcgcttataccactgctaagtaaattgggcattgacttagtagcagagaataagacattctctcagttcgtccatgagacgtttctcgctgctgaaccaacgccacgtttcgaaggatattttgatttttcagcggtagagaaacctgcgttttgcctggatgtggagaatctcagtctggaaaagaacggggtactgctggaaatcggcatcttgttctttgatctagctaatccagaatctgttattaacggcccacgtatagatatcttccctgacgtttatggtcaaatcgctgatggtggtgatattagtaagtccacggtagaatggtggcaaaccaaagcaccgaaggaagcgcgcgactattgttttcagcatgacggagtgatggactataaagaagccattaccacagtgaatgcgtttgttaacaatatccgtgatgaaatgaccgaatattacggtaaggatgccttctattatcttgctcgcggtgaaacagattggcctcaattagagcattggttccgtaaagcaggctttaagccagtttgtcgttataaccaggttcaggatatccgttcgatgattgccgcatatcaagacaaaccggtatccatcttaggtaccaaagagtatccagatatgggtattccgttgatccgtcataccgctatcggtgacgcaatcatggatgcgtatgacgttgcgaaggcgcgaagcatggcggcgtctaagcttctgaagtgacgacgtcacgcgcaatgaatatgacgatgatcgtttattaaaggaaagaagatgtctgaaaagcatattgagattcttgatgctgctattgcttcgaaagatagcgataagttcatcaaagcggtatttgcagaacagcgtaataacccagcaacgttgaataaaattcgcgatgcaatcgcattccgtcttaccaagtcagatgtttctgatgcggataaaacaacgatgcgtaaattacgtgatgatcttaatgcatacatcgctcgtggttgtacggataaaaccgttcgtgaggttctcgattctaacgtgaaatacgaatccgacttcaagaagaacggttcaacaccgaaaacagaataacagcatattccctcctccaacccaacagggaaggaggagggttatgttcgtattgaggttaacatgctcgatcgtgaacgattgaagaaaacgacaaagctcctcgatgagttcagaactgcgggtgaattcgagagcttcactaagaaccgagctattgttcggttccttctttatttgtgttgcgttgattcgtcggagcgggttagccatagttgccctctgctcgacgaaaatcgtattccgttatacaaagccgaagagttatgtgcgttcttgatgaaattcggtgttttctgcaacagatatcgtggtgatagatccgatgggtatcttgtcgaatttaatgtcttgtttcagtaaaacattaccaaaatagactatctaatgaggtgaaattcctcaatactactactactaggactactaaggaataaaacatgagtgttatcgtaaaagtaatgggtaactgcgatactagcgatcgtaacaacgcgaaaccgtttacgttgcatgtggtgcctgaccgtttgaccacaattgaattcaaccgtgattcgatgggtagaccgacactggagttcgtcgctcatggcgataaggatcaacgatttatcgattacccgggcggtaacgtttacgtgatggacaacggtaataccatcgcaacgtacgcctattcctgtggttttgggaaggatgatgttgaccgtatgtatgcggacgtccgtgctacgacgtatggggaagtgttggatacgagtggtaaactcgacgatcgccttatttgtgcgttgttggaaatacgtttaatcgatcgtgatataaaacaaacgcgcaatatcgagtttgtaaaatcagacaatcctaactttgttagtcatgtaaatcgtcttttacaagagttgtttactggtgaattaacggcatattacgccggtgcgagcggcaaaatcatcgcggtcgttaagtagtaatccctacgagggggtgggataataccccctcaatttgttgtactatctatcatttctattatctattatcatgaggttctattatgtctatctttttgaaaatgatgagcggttacaatctccctgatgagaacaacgcaaagccttgtacgattctaccgctttcggataaatgtaagattgaattcggtcgcgacgagtacggtgcacctgttgtgaccgtcacccatgaagacggaacagtcgagagttatcatcccgaagggaatacttaccttactgaagatcgtcgtacgatcgcagcttattcttattctgagtatgtgtcacctggtcgtcgtatgacggtagagtctgcgatgaaagaccttaagtactacgatgattacatgcagttcgcaaccaataaccggatcgtacatttcctatccgtgttagctggcgttcctcgcgggcaaaacataacccgtaaatgtcgtctgtctgttgacgatcgtatcggggtatcagtcatcgataaacttagcgagtttatcgtggatatgggctattgcttcgttggttataccgcgacaaatccgatggacgatgaagctattcatgttctcgaattcgctgttcttgtgaaataagctgattaatgaagcctcccgtaatgggaggcttttatgccgtcttaccctatctatcaaaactaacggattttaagaattctctgaagtcgggagaggagattaaaatgttaacatcagatcatacacgctatcgtgttaaatacctgaaacgttttaaaggtgcacaacctaaaatcgtggttcaaagaacaattacttgcctggaatacacaggtcatccccttacggaaatatatttcaaaacgctggatgttatcgatctaacccgggtgttcaggggacataaactcacagtaaataacatcacgttgcaagaagcaaccgaggaattccgtaaactattcaattattttctgtgttcatacgggattaaattcaacgaagtagaaatacgactacataaccacccaagaaaatcaccgtatcttgcggttagaccaaagaaaggacggatggctttaattggttgtgtccgtattcctatcgttcaatctgaaccggttcgtccgattatcacggtaaataagatcggagcgcttgctggacatgtaatcaacaacgtcttggtgattaccgacgataaaagtttgcattgtgtgtctgatgtaacgagcgagcaattacgaaacggtatcgcccttcttttctatcgtggtgatggaaacgttgtcgaattctgtcatcagcaggattgctgcgaagaggtgtatcttgaagacattgacggcgatattaatgatatcatcggtgaaaagatactcagtgctgaagaaagaaccgaggaaagaaccgatgactacggctattatagcgaacgtacacaatggacattctaccatatccgtactgcaaagggttgtgttgttatccgttggtatggtagttctaacggctattactcagagagtgttgatatcgacgtcgtaccacttaaagatagccttctgagaaaaccaaaacggctcgaggaacgctacggtcgttattgaggataacctacgttgtaagtaattagggcgtctcgacaaaaactctatttatttttactacgaggtgaaaacgatgttaacgaaggaatctaagaagaacattgaagcgtggatttttgatgatgtgccattgaatctatcatcggatccgaaggttcgtggtttacaagttgattacgcgtataacgtgttacatggctgctgttacacgttaagcaatcctaaatatcgttataaatttcaggaactactcgaaacacttagaggattaaaatgaaacagtatttggaccttttgcaagacatcatggataacggtcgcgataaggccgaccgcacgggcaccgggacccgttcggtattcgggcgtcagatgcgttttgacttgaagaaaggatttccgctggtaaccaccaagaagattcaccttaagagcgttatccacgaactgctctggtttcttaacggcgacacaaacgttgcttatcttcaagataacggtgttcgtatttggaatgaatgggctgataaggaagggaatctaggaccgatttacggcagacaatggcgagaatggattgactacaaagtggttgttccgcatgatacagaacgtactcgtgagttgatgcaacgcggctatgagtattgcggtgttgttgacgccggtatggtcaaacatctcttgtatgttaaacaccacgaccaaatcgcaaacatgatgcgtcaactcaaagaagatcctgattctcgacgaatcatcgttagcgcgtggaacgtaggtgatttagacgatatgcatctcgctccgtgccattcattctatcagttctatacccacgaactcacgatcgatgaacgcgttgattatgtccagcgcaatgacgtactaagaacccagtgggttacggatgatgtacgacacagtgaaacagaactctggttgaatgcgcataacgtaccaacacgtgctttatcctgtcagctttatcaacgttcgtgcgacacgctcttgggttggagctttaacgtcgcatcatactcgttgttaacacatatgcttgcccaacagctgaatatggacgttggtgagttcgtgtggacaggtggagattgtcatatctatcacaaccatttcgaacaggttaaagaacaacttagtcgtgagccgtatccattaccgaagctaacaatcgtacgtaaaccagaaagtattacggattaccgttacgaagactttgtgttcgtcggatatcaatcacaccccgctatcaaggctaaggtggcagtgtaaattaacaactgagggtgggtacgcccaccctaatacggagaactatcgtggatgaggtaagttctgaactgctagaagcaatggatgaacgagtaaccactatcggtttttatctcactggtgttactgaagcattacccacaccgaaaaatagttacgagatggaggctgatagcatacttacacaaacccttcctatacagcttaaagcggaaattaacgaacgtctacgcgtcgatatgcttacgaaagaacagcgtgaatccttgctggaagcattagataccatcgacaagagaatgacgcttcttaaattaggttttaagaagcaactgcattaagaatatcgagatttattttaggagtttagaatggcttggtcatatccctatcgtattctgataggtgttaaaaataagaaaggtcctcgtaaaggtaaatggagatacacctggatatgcggacagatagaactaaaaccgagaatcttctcggcctggagtaaaagtgatgattaattctctacagcgccatatactaaatcatgttatcaacgacatgattggtgttcgtttagtcaaaggaaaacacaagaaaggttgcaataaaggaaaacggttcgtggcgcatgtggtaccaaccaccgaacgaaggatcgcaaatgctgcggtggattctatcgcgaaagcgatgccatggcttatgttggactgactttttagaggaaagagaggttacgcatgcaatgtctcgaagaaacagaagcgggtaccctggcttatatcgatccggtgtatttatcccgatttatcgttgatcgatatttggatcgtgtttataacaaacgtattaaacgaggcccgggtaaaggcagacagaagaaagtaggtatctataaataccataaagcgcctaatccgatgtattgttggaggtagcgttgaaaaggatctacccgatgctaaacatcgcctattttcgtcgatgttggtatattcatcagtaccgcaaaaacaggaatcagattatcgaaataaagtttcatattgactctttactcaaactagagaaggtgaaagaacagccgttggttgtcgttcggttgaggtctttattagagcgtttacgtatagcgtcgcaggtgaatgagcagcttaatcaggcgaataaagcgcgatcagcacgggatgtacggaaatgttatcgttccggatttaaccatcgattgaaaagtatacgtaacagtttaaagcatataacggagaaagtggaatgataacgagtcaagttaacctagccgttaacagctataccgcttttgttgatttacttgataaattacgtaagcgaattgaatggcggctccaatatttcgatgaacgccagagccggataaccggcgagttgttatccgataaatctgttatttatctaagccatcatcgacttcttgatgaattatcccaattaagaaaagagtttatcgatctcggtgtttctacgaaaataaatacggagactgtgacaaaagatgacttgaaggtttatttcagccgttattgtgatttgaaatcatccctcaggcggatatatcaagactttaatagattagtgaaaagcacaaccacgactctcctgattgctgaacgaggtacaacatcatggaattaatggaaacaaaagaagagaaatacacacaactgaagaagaaactggaaaggcaaggttttctagcgaaacgtttaatccgtgttatgcgttataaatacaaatgctattttggtacagagctaccgaatggtgacgggcttgttagtgagtgtcgtcggacgatttcgcgcgttaacgatttactatcgcgtaatgattggtggtacaaagaatcggaaaacttcactgaaaccgaccgccgtaccgtatcccatttagaaagccagttgaaagagttaatggaagacagggccaacttacaacgtcgaatccatcaacgattcgatgactgggagaagggggcttttattaacggtgatgagatacgtatcgataacatcatcagacgccttatcgctaaagacgatgaggaagatttaccgttaccggacgatcacgataccgcgaaacaagttctcgaacaagcggtacgttgcatgggtgctttgctctccctgggtcatatcgaacgcaaaaagatcgttcaatgtaaattcgaaaaacttcttgttcagttccatcgcaagttcttttatagcaccgaaaaagaagttgctgtacaactaatagaaggtatcaatgaagttaaatagaactgttcggagtatacagtcattttggtatcgatattggtttaatcgtaatttacgtgacttcgttcggcttatccgttatgtgaagctcatgataaattgtcgtgagttaaatagagggttggggataggtagtgcgaggaaatatacgtacgatacagacccgtttatcgagtactgcaattcgtatataagagatatcgtggttctgatgaaatcgagccatgagttgtttatggattgcgattcttgctacaagtcctttctcggacgccgtgttcgtgcgaatcgaataagaaatgcgatttctatgttgcattggcgattttactattttccagaccccgataaataaataacgtgtatatgaatcagacagctataattgatatttataactaccgtaaatacacatccatgctcgatgctgcgacttcgctgttagaacacaagttacgcgaatgcaacacacagaccgccacagaagaagttctggatatcacacagttgttacttgatcgtttaaaagaacttcgaatttacgtcgcgagcatgtatggaaatggtcccgatgctgtatgtatcgcttacaacaaaccaagattgaccgtggagaagattatcgagcaaactggtaatattgacaatgaaatcaacgcctttataagcggcgtcaatacgttaaaactttaagagagatgatgaaaatgaacgaaaacaaatgtgaactggttccagatgaaaggttggttgagattcgtaactacttcctggccaatgaagagaacaaaccattcttcgtcttttcggataataaacatcaagcaacctgtgaactcgctgcagccgagggtatgcgtgatgcgttagtatatcgactggaagcgaaacgatctgttgtatcagacacgacagagatcgataatgcaatcaaggtagtcgatcgtcggtatgacgagttacttaccgaatacgagaacggatcgcaaacggtaattcttcactaatccgccccatccatttgcatggagacgcagatgttcaacagttcgatggtgtattacggtagtatcgttcaggtattggtacctttcatcgatgaacgtacctgtttagcggcagacgcacggtatattcaacgttgggtaaaacttgggcgattaacacgaaaacatttacagcatgcgacgacctcaacccatgctgcgattcatcttattgaccctaactttcgcgacggtaaaagacatattcacctttatcgtgaaagttatgtccgctggttagaaaacgcattaaaggataaagaacatgagtaacacagttaaacttaatgaaaacaatttttcaaaactggacgattttatcgaagaatatatcgagaaaaagcaatgggctattatcagtgtcgctcctgatgagggaagcgacgagcctggctttatgtatactgttggtctaaccgaacacggaatgccggaaatcttcgtatccggttattgccctgctctcggttcagcaatcaacaaactgggtaacttcatggtgaaggcaaagaccatcccgttaggcgcgttcgatggcaatctaactctgaaaggtacgggtgaaaccttgcgtcttgacgtgcgtgaaatagaggatattgaatccttcaacgaagtgtatgcgatagcggctttcgctcgatatggtaaaaaggttgcgggtattcagctcgtttggcctgacaccagcaatacgttaccacatgaaggtggttacgaatcatgctgctgtccgcagatcctgctttaatcttaataccaataattaaattgtttataggagtttttgtgaaatcgaccatcagccgcactgattttcatcccgatcgtattgcggagacctttgctcgtatggataataacacattcgcagtgttgttcaacagcggatttgattctaccaacgagacccatcgttctaccggtgtgactatcgatgcggaatgtgtccatgttaaggaaacaagcgcggaataagatgcgatgtatgtcattatcgatgatgttgaaggacgacagctaacaccagttcaatcgttacgattgcgtaatgctgcactgatgtacgctgtgttatggtgggattgtaaaacacgtttacctagcgatgcaaaatcgatgcgacgctattcagaagcattagtgtcgtgtgggcatgatgagatctttcaacgactctttgagcggctatcaggttatcaagcaatcattcggaagggtttgtttatctcgattgagtggttcggtactgagttgcggttaatcgttgaccgcaagggcatgacgttacgccctaacacattcgagtcgacacgagcgattgcttggtgggacgaggaaggtaatcgtctctggtgataaacaccccgtcttaatgacgggggatacgcttaagtaaaggtatgagatcagacaataaccgaacgaggtgagacatggtgaataatgaagagtatacggaaataaaatcttgggttgctaaagcgctgcttgcgtatagcgctgtcggcgtactgtttgctgtaatcggcatggtaggtatgctacgatgagcatcgaggatgactttttacggaacgcacttgacttttattctaaaccattaacacccggtgggttggaattgggtgtggtcaatcccgataaactgcatccaattgctaaatggttgaatcaacatcgagaagggctgtattccgttgaccaaccggaactggtggcacgctggcatattaagaaaaacggtctcgatatgtcgttaaatgcgcgtgtgaacaaagaccatattgccctatcgatcatgggtactttttaacgaggataatttacatggcttctattggcccaatcgataagacacgcgatgcggtaaaggcgttgctcgaaagaatttattttgagcttgcgaatgctgaacatccaagcgtgagtcttttcgacgataaactcacagcgattaataacgttcatccgatgctatatcaggatctccttacgtcatggaaaccgatgggtgttttcgctaacgctttttcagataccgtcgtagccagcggctttgaaaaaccgaagctaccttttgtctatgagccgtcagtcgatccaaaacgcgagcgtctgggtgttttaacgcacgcattgattgacagtattggttattatctttcctctgaatggacagccaaatacaccgagctgttagacgaatacgaactgtggcgtaatcagatcttaacggatgcggagaagaaagcgtacgcgatcgcgttggcagagaaaacccgtggggatgttggtcgcttaatccacgatttttacgcggttttgaaaccaacctactacgaaacaaaacgtcagctgacctgggaagaagcacgggcgttgatgcagaacgcagaaacagcggatgatgttgcgggtataatccacgattactgtatgtcaagaatcctgctggataaaggcaatcagaaatacgttcgtgaggttccgcttcccaataacgcgctgggtatcgcaaacgagattttcgagttcctgaacgagtggaatccaccgttacttgcgattacgtatatctgcgatgatattcttactgaggatctgttccttccattgttaggtgaagcgtcgctgcgacgttattcccaaacgttcaagaacagcgcaacgatggcatctaccgtaccggttagtttaccacgtcgtcgtaaaatgcttacggtatccgcaggtaagattaacctcttagtgttgtattatgctgtaagaaacggcttaccaacattaattttcaggaaaaagtaaatggctgaagcgactgtacaaaacccctttcattgattcaacaaataaacatacagatttctccaaaatgctgttctctcgaacttgcattatcccacatcgaaaactggataacatttcgtcgtacggtgcatccgcgttttccggtaaatatcagtcctgttgttgtggttgcattagaaagcgaggaccttactcaagacatgtggcaacgcattcgtggtcgcataccgcaatacgtaaatgtgatgggtgttctgttagtaagtgataccgaagcgttcgaaagccatccgttgtgttacgccgatgtggtggttacggataacccaacaatgcttgaacgcatgcaggccgtactgaccaatccggttcgaacggaaatagtcatcaacattatcggaacgccaatcgatgagcagaacatttcttaaatggcttgggaacaaaaccaggcttatccctgagattgaaaaagtgttacctaaaggaaagcgtcttgttgaaccattcgttggttccggcgctgttacgcttgctcttaagtacccagcgtattcgataggtgatgcgaatgaggatattctctcagtatggtctgcgttgctagcgcgtccagaatctttcatcgaagaagtggaacgtctttttcaaacggatcctaccgacgtcagaagctactacgagatacgtgaacgttttaaccgcgctgaagatccgtgggaacgcgcagtttgcttcatgtatttaaaccgttacggtttcaatggcttatgtcgttataatcgtgatggtttatttaatgttgcgcgtgggcggtataagaccgtctatttcccgaaacaggaattgcgtctggcagcgaaccatcttcaggctgccttcgtcgagggggggtagaaattgtaagtggtgggttccagaagcatcttgaaaaggtggttccgggtgacgtcgtttattgcgaccctccttatattcccatttcccccaccgcatcgtttacgggctatactcaagaggggtttacattagacgatcatcgttatcttgcagaaaaggctgacaacttgcgctcgcggggaattcctacaatcattagcaacagtgcttgtgcgttgactgaagagatttatagttcggcgacaaaattgtaccctgtaactgtacgaagaacgatttcggcaaaagtagaaacaagaaacttggtttcagaatatttgatagtttatgaataggacgattatgcgttattggaaactttctgcttatcaaattgcgttattaggtattgataccaaagaaaaagaattgttgcacggtgaactcgacaccgcttatctttcagaaaacaacatggttgtatgtaaatttgttggattaacgactcgacgtaatgtggtacatgaaacctatgcgttgaagggtaagggcatgcaggaagttgctgctgtgattcgtaccggtattgtggtaccgcctggcgtaagtgataatcttgatgaggtgttacatggaactcgtaaaacagcccgttaatgcgtggacgctcatgccggatgaagcggttcgctacggcttctttaggaaacacgccccgaagctcatggatggtaccatcggaccggaacaagatctgatgtatgtcgtgttgttcgatgactatcgtgcgatggcgatttacggtgagtcgggaaaagcacacgtcgtacacatcgaacgttatgtgttcaatgagttggatgttaaggaacagtttgacgccatcatgatgaacacgaaacccgtacctgaacagatcaagcttcagttcctcacgatgttgaatccggatgaacggacggtgcgacttattcgtaacgatcctgccacccaggaactcacggaagtattactggatctgaaactgcacgtcgccctcgaacgtgcggaaggtggtaaagttaatacctgcatccgtcaattctgtaaactacgtgaagcgaaggttaaacatcatcagacacggaatatcctgaaagcgattcgttctgttgcgttacctgaaattaaaatgaaggaagtactgtctttatacgaagcctatatgaacgacgaagtcgaatgcgttgtgaagtcttgatgaaataaaagcgtattgcctgtgtccctcccatcacgggcgggcacgggcgttatgccgatgtacattttgacaattttttggtttcgtatggaggaaacgacaacatgattctacagatgctcggctgcctgtatttatccggctggctaattgaaatagttacagtgaccatcgggttacataagcacggtattaaatccccaacctacacgcttccagcacattgctttgcgatgatgggagcattcccttttatcgccctcgggtcgattttctggccgctgttttggttcgaacgtcggttgcccgaagaagttcgacagaaacgtcgtcgtgacgcactcgctcgccgagaagaacgccagagaaacaaaggtaaacgtaaatgaaaatcactgccg

SEQ ID NO: 3 - DNA, 642 bp, Asteriusvirus sp.
  source 1..642: mol_type = genomic DNA
atggcaaagaaatcaagtaaccaagtatatacctgtagattttgtgatcgtgaatttaaacgtgaagaaactgtaaacacacataaatgtataaaacgtgaccgatacgaagaccgccaaagccgccagatgatggaggcttttcgtatatatatgcaatttatggaattgaataagttcccatttaaaaaaggcgtagagccttttattgcttttataaagtcaaagtactttaatgatttttataattttgccgaatactatttgaataatagagatattattaatgtggacgagtttgtaaagtacttgattatcaataacaaaccaatcacggaatggagtacatataaagcaaaagatgaatggatattaaaaacgattcgtgccgagcacccaaaagaagcaattgcaagaagtgttatctcactggttgaatgggctgaaaatttgaatgtacaatggaatactttctttgaaaatgtaagttctgctcgtgcaattgcatggatagagagtggtaaaatttcaccttggattatctggcttgctcctaaaaaaagtactaataagttttttaaaaaactatcaaactcagaaattgaatatatacttaaatacatcgatccaagttattttgaa

SEQ ID NO: 4 - DNA, 846 bp, Asteriusvirus sp.
  source 1..846: mol_type = genomic DNA
gtgtttgatttcagtgatattaaaaataagtcggtcgatgatgatgaaaaaccaacacagcattctttttctattgctgaatttctaaaacacattgaccgtgctgattataagtactataatgacatgaccgaaaaagaacgaaaagagtttactccatatactgttttgcgatgggtaagctctttagatgattcgttacaagtaacctaccctagtagtaaagttgaaagtgtatttggaaaatggaaatcaggtggtaaagaagcactgactgaactagttactgaattaaagtcttcagggacaaatgtttcatcagtaactaagtactgtcatagtgattatgattggcgtattaaatttgcagtccaatcaaaagatgacgcacaaaaattaatatcatcaatggtcgaatttggtgtatcaggttccgaaattgtttcattggtagatactgaagttgtcaaataccaacttattatgctaaatgatatggttaatgatggattttgggatatgaaagaacatccagaattagtatatcagcttatgtgttcagtgcatgatatgattggtggacaagaaatgccacgtaactggttaaacttttctaagaatttcaaaaaagcaaataatgaattatttgagttaattaaaagctcacaacctgatactatatctactcaaatgaatgaagatgagtacaaaattgttctattacagtatgataaaaaaacatttgagacatttcttgacaataatggttttcaagataatgaaaagaaatctatgatgaaattgtttaaagaagaatgtaaaaaatatggcaaagaaatcaagtaa

SEQ ID NO: 5 - DNA, 498 bp, Asteriusvirus sp.
  source 1..498: mol_type = genomic DNA
atgaacgtattaacacctgaaaataattcttttgacatggatttagtaacagaacatattcctgaagaaatgtattgtgttttggatctaagcccaaatggtgaatctgatttttattttagacatattctaaacaccgtatcatttaatagtattagtgctgatcttcaaattggtgaaaagattattcaagtgcctctcggatggcaaattatgttaggtgatgaagaaactggtatggttgagatgtgtacaattgaaaacattcttaacatgaaagaaccaaaagcttttgtttacaatcctatccgttcaatgtatcctaagtttgaaccagtcaaagtactacgtgtatttgcattaactacaaagtggcagataccaatgttacctaaaaagaatttactatgtgtcccactacatagtggtgaaaatccaccatgtgtgtactttgccgatgaaaacgaaaaaattcaagatttgtatctaggagtataa

SEQ ID NO: 6 - DNA, 429 bp, Asteriusvirus sp.
  source 1..429: mol_type = genomic DNA
atggaattgagatctagtattgcttttatctgtgaccaagaaactttagaagttatggatgtattgttgaacgatgatggtattatggatgacatggtatcttctcttgactatatacctgagctagaaacggatgatactaacgtatggagatgtaatattgatagtgattcttggattaatatctatgaattacaaacacgaattgattctaaagtagaatcattgaaatatgatatcatctatgcaagtactgacacgaaaacttttattgatgtagtaagtctaagtggtaattttgattcatatctggatactgatgtagataaaattcaagagatgtgtgaaacttatggacttgaattttatggtgtagaagaccaagatgatgaagaatattatgatgacgaagaagattcgcagtactaa

SEQ ID NO: 7 - DNA, 1485 bp, Asteriusvirus sp.
  source 1..1485: mol_type = genomic DNA
atgaaaacttgtaagttaaccttattggatgaggtgaattgtaaatttgagggacttgatccctcaattagacaaaagatgattcgtgcaactgaatatgtgttgccatatgcaaagttcacaccagcaggacgtattggacgttgggatggtaaagttcagtttatgaatttaggcgggacaacttattatcatatgttagataagttattgcctattcttgatgaagctaagattgacattgaattagtagatcatagggtagattatggatttaaatttgaccctattgatgaagatatttttagtgatgttgtattcggtgcaggacaccacatggaaggtaaatccataaaactgcgtgaacatcaagttaatgcggttaatgcatgtttggctaatccacacggactactattggcagctactggtgcaggtaaaactctcattactgctgcattgtcaaagaaagtgcaagagtatggacgttctgttataatagtaccaagtactgatttagtacaacaaacatatgatgactatattatgtgtggcttggacactggtatgttctatggttcacaaaaagatttcggtcaccaacatacaatcacgacttggcaatcttttaactctctttggaagaaaaccaaaaaaggtgaaatagaattaacagaacaagacgtgaatgattttattgatggtgtagtttgtgttatagttgatgagtgtcaaggtgctggtggtgatgcattagttcaagtactatctaaggttatgaacaacgtaccattgcgttggggtcttactggtacaattccaaaagatccagtggttgcagctaaaattaaatgtaatgttggtgatgttatattcaaaataactgccaaagaattacaagataaacagatactaagtacatgtaatgtgaattgtattaaactaaaaagtagtatgaagtttgcatcatatgctgaagagttgaaatacttagtaactgacagagataggatggcatatgtagcgtcattgatatctgcgttatctgaatcaggaaacactttagttttagtagatagacttgaagcaggtgagttgctatgtgaatttttaggtattccaaaatcagaattcgttcgtggagaaaccaaaaagaaagatcgagaatcatcttatggtgaaattcgttgggctgataataaaatacttattgcgacatacggcgttgccagtactggtattagtatttcaaggttatataatgtagtattgattgagccaggaaaaagttttgtaagaactatacagtcaattggacgtggattacgccgagcagaagataaagatcacgtagaaatatatgatattagtggttctaataagtatagtgcaaagcatttacgagaacgtttagcttactataaggaagcacaatatcctcatagtattatagatgttaaagattgggaaaacacagcgggataa

SEQ ID NO: 8 - DNA, 819 bp, Asteriusvirus sp.
  source 1..819: mol_type = genomic DNA
atgacaaaattaaatgagtttttatcaaatgtagcagttctagatactgaaactactggggttgagagtgaagatgatattattgaatttagtatctcgtatccacatacttcacatgaaaacattgatactattgataactatacattgagatacaaacccttgaaagatattccacccgaggcatctgctgtgcactttatcagtactgaggatgtagctaattgtgttgggtataaagatgatttagataacattgatgcacttatgggatgccgtaagtattttgttggtcataatgtacaatttgaccgtagaatgatggtagataacgaatataaatatcgtaactcaatttcacagtacttacttgatgaaaataaatggatttgtacccttcgtcttgctaagaaaatgttcgcagaagatattgaatttaaaaacttaactctaagttatttgtggtataagtttggatgttatcgtgatgttcatcgacctgttaatgcacacgcagcaaaagacgatgtgttcatgtgttatcaggttctaatcaaattagttgaaattgcaatcgaacgtggacatattgaacctaatggtgatattggtgagcaaattgtaactttctgcaacacaccaatgcgttatcaattcatgccatttggtaaacacaaaggtgagccaatgagtacagttccattgaattacattgaatggatgattactaatagtgacattttagatgcaagtaaccctaactgtgataaagatttagtatatacatttgagtacgaatataatactcgaactaattaa

SEQ ID NO: 9 - DNA, 462 bp, Asteriusvirus sp.
  source 1..462: mol_type = genomic DNA
atgaaaccttggcattggattatcaaagatgataaatctaaaattattgaaatgattgagttctttaacaaagaagttgaagaagctcgtcgtgaagtaaagaagattggcatcattgaaaaaattgctcaagagattcctggctggcatgagacgcgtctaagccagcttcaagaacttgaagcagtattggaaatgttagaaattgaaatgcgtcaggtacaagccgagaagttcaaatactttctcgaaggataccgccgtgcactatcttcatctgactgtaaaaagtatgttgaaggtgataaagatgtttgtgagttagcagaacttataaacgaggtatcttatataagaaatacatattcaagtattgttaaatccttagagatgaaagcttttcagttaaacaatattgtgagactacgtgccgctggtattgaggatgcacgtttagaataa

SEQ ID NO: 10 - DNA, 1119 bp, Asteriusvirus sp.
  source 1..1119: mol_type = genomic DNA
atgaaaatgacaagtggttttgcgaacattcttaaaaacagtactggtagtgttaaaaagaatactggtgttagtgttggttttcatgatccagatacatgggttagtactggtaactacgcactaaattatcgcatcagtggctattttgaccgtggtatcccactaggcaaagtaactatgtttgctggtgaatcaggtagtggtaaatcttttatcgtatctggtaatattgcacgtgaagctcaaaaacaaggcatctttgttgttatgattgactcagagaacgcattggattcagattggcttcaagcacttggtgttgacacttctgaagaaaaacttttgaaagtcaatatgggtatgattggtgacgttgcaaaattcacctatgagttcattgaaggatatcgtaaagaatacgaaaatacacctaaagatgaacgtcaaaaagtattgtttattattgattcaattggtatgctaaacactgaagtagccaatgatcaaatgaaagcgggtaaccttaaaggtgacatgggtcataaacccaaacagcttaaagcatatatcacaaactgtgtaaactctattggttcattgaacattggtatggtttgcgttaaccacagttatgaatctcaggacatgtttaacccagatcctaaagtttcaggtggtagtggtttgatttatgcttcatctatggttatcgcaatgggtaaattaaaacttaaagaagatgaagacggaaataaaacttccgaagtaaatggtattcgtgctaaatgtaaagtcatgaagactcgttacaacaagccgtttgaagatgtagaaattaaaattccttgggataaaggtatggacccacgtagtggcctactagatatgtttgaaaaatacggtctaatcactaaatcaggtaaccgtctattgtatgttgatattgtaactggcgaacagattctaaaatatcgcaaagagtggatgcgtaatgaagattcatgtcttgatttggtaatgcatcaatttaaaaatcatcctttgattgaagaagttaaagaagaagaaaaaggtgatgaaacttttggtactgatgtggatattagtgaggaataa

SEQ ID NO: 11 - DNA, 1053 bp, Asteriusvirus sp.
  source 1..1053: mol_type = genomic DNA
atgaaatctctagctgaaattcgtgcacacctaaaagcagaacaagaaaaagcagaagctcaaaagaatggtacatttactggcgagcgtaaagctgattcgttcttagctttctggaacgtaccttataacgaaccactaaacctacgttttctaccagatgcagatgagtctaacccattcttctggcgtgaacgtgacatgattaacctaactttcaatggtgtagtcggtatgcacactgataaagttaccgttcaagtgccttgcaacgaaatgtgggttcctaaatcctgtccggttctgaaagaagtacgtcaatggttccaaagtgcgaatgaaacagggaacgaagaactaaaagcaatggctggtcgttactggaagaagaaaacctatctaatgcaatgttttattgctcctgatagcgttgcagtaaaagacgacattgcaccagaaaatccaattcgtcgtattctggctaacaaagatatctttgataaagttaaatccatcctgctaaacccaggcatcaaagagtctccaactcactacgttcaaggtcgtgattttggtattgttaaaactaagaatggtggtggttataatagctacgacatgtctcaattctccatgtctgagcgtccactaaacgaagaagaactagcagcaattgaaaaatatggcctatacaatctaaatgattttatgccaaaacaaccaactccagaagagttgaaagcaattgaagaaatgttcgaagcatcagtaaatggtgaagcatatgatccagcacgttgggcatttgcatatcgtccagcaggtgtaccaaaacctaactctggaactgttactgaatcaaaaccaactcctgctccagtacaacaagagtcagaacctgcaccagtagcacctactgctccagttacaccagccccacaagctgctccagtaactccagtcgctaccccagcagcaaccactcctgaagcaccaaaagaacaactatctgcatctgcactagttgctcgtttgaaacaacaaggtaagtaa

SEQ ID NO: 12 - DNA, 99 bp, Asteriusvirus sp.
  source 1..99: mol_type = genomic DNA
ttgttatttgttaattggcttcaatgtttcagaaacttcattgttccttcaacgttttacattatagcacaggtttttatactgtcccatattttttaa

SEQ ID NO: 13 - DNA, 1287 bp, Asteriusvirus sp.
  source 1..1287: mol_type = genomic DNA
atgatgaaaggggttctttgttcagacatttataagattttggcagcaccacaatatgaatatagtattactatgttcaatgacgaaggtgaaggaactatcagtccacaggaagctaagtggttttatattagacctgtgaattttatgatccaagcaccaagtggtgatgacgcagtacgcccagaagtttatctatggaaaagtactgatataaaagatgaacaaacattacaagttttaaaacgtcttaaaaacgttgctaatcaatatggatatggtttcacagtatacgactttggttctgggaatttacctaaaaagttctctcacattgccatgcgtaatatggaagaaactaaacaaaatgatttaaatgaaagccttgatggaagtgctatgcgttcttattacaaactaccaagagcaaagatggtagtagttcataagagtcgtgtagaagaaggcattaagggttcacgaactagaaacataaaagagatttttgtggaatctaatggtgaacgtagacgaatgagtactacaaatttacatgcagcaagagcaatgacccatcatttaaatgagggtggcgagtatggtgataaatttgggtcttatatagaaggttcagcacgcgaccttgaaaatttaaaagcgttgctatcagaactagaaattggtggtcgaagccattatgcttccaaaactatgcaatacattaataatttgaaaaataacttaaagctcgctggaacaccacgtggatatcagactcaactgagtacacacaaggaactaccgagaattggtaatacatacatagataattttgctaataagttaggaacacttggctccgatcacgaccataatagaagttttgcgaagtattttctactcgatgagtgtaaaatgttatctgaatatttaaatacaatacaacaaaatatcagtactgacatctcagaccccaaagaaataacacgaagtgcaaaacgtgtatgtttaggttgtgtaccagttgatggtgaatttgaatttggtgaaataccagatgatgaaaataaagtccttatgtttggtaataaaatcgttgatttgattcaagatggtattattaaggacgcagtaatgggtatatgtgagaaaccttacatggaaccatctgacgcaaaatttatcattgcagtaggaaattctcttttaggtaacaaacctaaaaagcaaatcttactagaacctgaacttgaatcgctcaaggaatgggcaaatggtaaaaaatag

SEQ ID NO: 14 - DNA, 1641 bp, Asteriusvirus sp.
  source 1..1641: mol_type = genomic DNA
atgatggaaaatatagacaattatgaagatgagttggaatatactcgaataaaaaaacctggtctaaagatgaactataccgtctttgaacaggaagaattagcaaagtgtgctgctgacccaatttactttatggaaaattacttttacattgttagtaaaggtggtgaaatactttttaagccatatgattaccaaaaggaaatggtaagaaactttcaaggttatgaaaacaacattatgttaacggctcgtcagatgggtaaaactactgttgcagcagcatttattttgtggtatgctatgtttaactctacaaaaacaattttattgttggggaacattctagcaactgctaaagaaattatggaacgtatccagtttgcatatgagatgtgtcctgactttatacgtgatggtgttgaaaagtataacgtaactgaagttcgctttgaaaataaatcaagaattattgcccgtgcaactacaccatctgctgcccgtggtctttctgtaaacttactttatcttgatgaatttgcattcgtacctgaaggtttccaagcggaattctggtcagcagtatcaccaacacttgtatcatccaaaggtcgttgtataatcactagtacaccaaacactgagtatgaccagtttgcttctatatggaacgaatcccagcgttttgtcgatgaaggtggtaatgaatacgatcctaatggaactggtataaatgattttaaaggtataatggtacgttgggattctcaccctgaccgtacacaagaatgggcaactaaagaagaatataagatcggttcatcgcgttttaaacgagaatacaattgtgagtttgtaacttaccaagaaactttaattgacggtattaaactaagtgaaattaaaaaacgtagtgtaagagaacctattaaagtaactgatgacattcagtggttcaaaccaattgaatatggaatgacttatgttgtggggcttgacccaagtggcggtactggcggtgatgacgcagcaatccaagtatatgaattaccaaccttacgccaagttgcagaatggaaaaacaacaaatatttgattacagaccaagtaaaacttttaagacgaatactcttgcagattgcttatgaaatgcaagaaatgggagccagaaacatagaagatagtttattctggacattggaaaataacagtataggtgaagcagcaattcttgctgtacagaatttaggtattgagaatttccctggaacattaatcaatgaaccaagaagaacacgcactggtcgtattcgtaagggaatgactacaactaaaagtactaaaaaaactgcatgtattcatatgcaaaaattgatggaaacattccgaatggatgttgccagtaaaaacttacatcgccagcttaacgattttatacgtgcaggttcagaagacggtgtttttaaggcaaaattaggttgtaaagatgacttagtaagtgcaacactacttattgtgcgtatgattgatattatttctaaatttgaagaaaatactgctgatgttattggagaaacactagaagatttcgatgagtcatattttatgccacttgggtacatgatgacttataaccgataa

SEQ ID NO: 15 - DNA, 684 bp, Asteriusvirus sp.
  source 1..684: mol_type = genomic DNA
atggataatttaataacttataatacattaacgaattatgatagttcaactatctttgatagaatgttagaaaaatctgataatacgtatgttgctgtagttcctccaagaattggtactaccgaatctataggtgcttatgcactttacaagattttgaaatcaaaagaacgtcaaagtatggttatatcagcaccaacttcgtttaaagctaatatacaatcaatgaagtttcattttgaaaaaatgatatcaaatattaataataactttgatttgaaactatcagttatgcatactggttcatcaagtattattagatgtaaaagtactgttataggagaaatactatatagatctttatcagatgatagtttacgcggatttggtaggagtgaaattatcattgatctgtcaacgcatatgagggatgaacacttcaatgccatgttagatacaattagatattgtaaaaatataaaagtaataattaattctcgttcattatcttttttctctatattagataaatttccagaagtagagtatctcccttttttcttacataatagtattgatttgttttcataccaacaaacaatgctaaatatattaggcattcataaatttgaagaatattgcctaatgaaagggaaatatgatggaaaatatagacaattatga

SEQ ID NO: 16 - DNA, 486 bp, Asteriusvirus sp.
  source 1..486: mol_type = genomic DNA
atggcaattctaaaaaaattaactgattattcttatatcgctgaaactgatagttcagaaaagattggtattctaatagatcatgatagaagcccaactgaatataaaggtgttgaattttttacgtcagatggggtattgaagtttgattctttaaatgagttggaagaactattaggaacaccatttaaatatgaagaagtacaagtcaaggatacaaatactaagttcataggagattatccagttaacgaaactgataatgtttatgatgtacaagaaacagacagcggattgtgtacttttaagaaaagtcaaaaatccaaaaaacgtttttatcctggctggtggcttgttaaaaccgaagctgggacatataacccacgttgtacaatcagtactgatacatttgatgaacataaagacgatatatatggtccatataaaacatttatggaactaacttatcaacaaaaaaacttataa

SEQ ID NO: 17 - DNA, 987 bp, Asteriusvirus sp.
  source 1..987: mol_type = genomic DNA
atgaaaaaattatatctactcgtcgatactcaaaactgtttccatcgtagtatcaacgtatcatctcaaagtattgacatatggacaaaggtggggttagcactacatattactttgagcggtttaagaaaactacaagacatgtttaatcctaatcacgttgttttctgtgcagagggtaaatcatggcgtaaaaagtttgacgaagattataaaagaaatcgtgcagtaaaagcagccagcaaaactaaagatgaaaaagaagaaatggaagtgatgtttgaaatgattaatgatttcatcgacttcgtagataatcagactaacagtactttactacgtgcaccagaagcagaggctgatgactttattgctcgctggattcaaacacatcctgaagatgaccatatcattgtcagtactgataccgacttccgtcaattacttgcatttaatgttcgtcaatataacccagtacaagaaatgatgtatacaacaactggtgtttttgataaaaataatgaaccagcacatgataaaaaaggaaaaccgattgaaactcctaaccctgagtttttattgttccaaaaatgtattaagggtgatacctcagataatgtattcagtgcatatcctggtgcaagaatgaaaagtactaaaaaagcagtaggtattgaagaagcatttaatgatcgtcactctcgcggttatgcatggaattcatttatgaatcataaatggactagaccagatggagttgaagtctgtgttaaagatgcatatgcacataatcaagtactggttgatttgactaaacaaccacctgaaattattgaaatgatggatgatgttatttttaaccgtgaacctaaaaataacccattaatcggtgttcatttcttaagatttgccgctaagtatgatttagtacacgttcaacgttcccctgaatcatatattaaactattcacaaagaaggatgagtaa

SEQ ID NO: 18 - DNA, 600 bp, Asteriusvirus sp.
  source 1..600: mol_type = genomic DNA
atgagtcttaattcttttaaccgtaactatggtatgtctagcgttgctcgcgaatggtggggtggtaataacggtttcgttaccatcgtaatcgatctaccaactgatgttgaactaggtactaccaaagttacttctgacggttctgatgttcaagctgaagcgtatcaaactgctctaagtaatgctcaatataacctattcatggttacccaactactacaacaacgtgcagttctagttactacctctctactagctcttgattcagaagttgttattcctgctgatttcaaaaatgctaatccaaacgtagttgcgttcggtactagtggtgctgatgtagcaggtggtgctaattctgttgcattgactttcatctgtgaacgtcaagacgtatttaacaagcaagaagttcgtcctggttcagcatgtcctgctccagttgatccaactgttgacctagctaagtctatcgctcaagctaaagttttccgtaccaaaactttcgtaagtcaaggtactgatggtgttggtgatgcaggtgcatctactgctgtagcaattaaagtacgtgctgctcttcctgttcaactataa

SEQ ID NO: 19 - DNA, 690 bp, Asteriusvirus sp.
  source 1..690: mol_type = genomic DNA
atgtcatatactaatacttcttttgaacgtatcaatggttattcctttgaacgtattctaggttacttttgtggcactaacgccctagcatccattgctatcagtaagctaggaaacgtaaacgttctagttactggtgcagtttcttcttatgctggtctacaacgttttctaaacactgatattccagaagaaattctagcatatctaaatgataaaggtatcaaacgtattgatggaactgcatttgttcttggcacactagaagctgattacaatgcatcttatgcagcacaaactaacgttaaacgtattgtcgatgttgttcaacaacgtgcggttatcatcgctacctctaacatcgcaggtaatggtcttgaagtatttccagttactggtttcaccaacgcacctgatggtgtattgagtgcaggttcagttagtattgctgatgcttccgttgtaaccttcctagttgaacgtgctggtgtctttaacaaagatcttaaatcaccacaaggtgtaccaagtactgaatccgaagaaggccgtctactaattgatgacctaactggtgttccgctacttgctaaagatggtgttactgaagtttatctacgttcccagtctgctgatgcagcaggggatttcggtgttaaacttttccaatacatcccagcattggtttaa

SEQ ID NO: 20 - DNA, 726 bp, Asteriusvirus sp.
  source 1..726: mol_type = genomic DNA
atggctaaaaagaaatttattccattttggatggtccctgctcactggggactttctggaaaggcaaaagagatagctaaagcatactactacaatgatgattatgaagctgatatgaaagttgctgaattgacatatctaactccatatgaagttgaagtggcccaattggatattaaaaagaaatatagcgtaattggagatttggaatatctaattgctgtacttgatgttgaactaaaatattctaaaattactcgtgaacagtataatgttaaagttcttgatgcaaaactaagtactggttctattactgaaaaagaatatgatatggaaatcattgagttaatgccagacggtgatgaaaaaaggcttaaggctatagaatttgcatatcgttatgaagaaatcactcaaagtgaatattcaaaggagatatatacacttcgaaaagagccttggattgatttggatgtggttcttgatcctgaaacaaatgaagttgagtttgtttttgactataacgaatatttctggaaaaagttgaaagccgaaggtcatccaggtaatgatgaagaagaaatcatagataactttgttagagacttggggcgtaaacttgctacggatgatttcagtgatgattacgacacaaagctagtgagtgcgaacgaaggattagacaagctacctggtttacctgaaggatttcgttcatatagataa

SEQ ID NO: 21 - DNA, 300 bp, Asteriusvirus sp.
  source 1..300: mol_type = genomic DNA
atgaaaattaaaatgattaatgattacgttcttgttcgacaaattgaagcacagaataaaagtactggtggtattattctaggtaatgttgaaccaccatgtattgggatggtaatttccgttggtccaggtaaaattcttccgaacggacaacttgcagaacataatattaaagaaggtgatatggttgtgtttggtcgttcatctttgaacacacctctgactgaagatcttggtggtggtgaagatacatattatgtaatgaaaatcgaagagatttttggtaagaaaaatggctaa

SEQ ID NO: 22 - DNA, 207 bp, Asteriusvirus sp.
  source 1..207: mol_type = genomic DNA
atgccattatatacatatcgttgtgaaaaagaagaatgcaaacatagcatggaaaaaattgttaaaattgcaaaccgtgatgaacctcatgattgtcctaaatgtaatggtgaaaaaactatgaagttggaagtattcactccaggtgataagggtgctaatctttatttccgtggaaaatggtttgcaaatactggaggttactaa

SEQ ID NO: 23 - DNA, 732 bp, Asteriusvirus sp.
  source 1..732: mol_type = genomic DNA
atggatctacgcaacgtactacgtgacctcgtaaacacaaccagcggtattgacttctcttgtattgcagtaagcagtgaagaccgtggtgaaggacaacgtgtatatctagaagcgtacacagatgaccgaactcttgtaatgcgagcatatactaaagaagatgttcctgaagttcagggtcgttttggtttaggtaatctaggtcttcttcagggtctaatgtctctaaaaacatacagtactgaaggaaccacaatcacatcaaatgttaaagatggttcagttaaaagtcttgcatttaaatctgaagatgcaagcactacatttatggtacaagctgaaaaacttattccagttcaaccacgtttccatgaacaaccatatgacgtacaggttattcctagtgcagcaaaagttcaggaactaaagagtttttctggcgtatttaaatcttttagttctcttgtaactccatatactgaaggtgacaccctatactttcacgttggtgagaaaaacaaaagcaaccacgttggttctctagctttttctaaaactgaaggtgaattaggtcttggttttggttataatattgatcgcgtacttcaagcattatctcgcgtatccaatgccgaatcagtatcacttggtattactaaaactggtatgctaaatgtaacactagatactggaattgcagtatacaaattttacgtaacaggctgctaa

SEQ ID NO: 24 - DNA, 300 bp, Asteriusvirus sp.
  source 1..300: mol_type = genomic DNA
atgatgagtaatatatataagcgtattggtgaagtattagaaggtaatggtatcattaattctgtactagcgtatgataatgatgaagaagtagttctaattggtgcgggttttactcgcactggttcagtggaagttgacggagagattgctgatgtttacactcttgtgaaaaagcgtaaagttgtttttgtcgatgatgtacatacattaaaagacttgaaaaaattacgcgataaaattggcatgagttctacaattgataagccttatcttcaacgttggaatacaaaatactga

SEQ ID NO: 25 - DNA, 150 bp, Asteriusvirus sp.
  source 1..150: mol_type = genomic DNA
atggttattgtaaatgaaattgaactaaactatgacgaagtaaacgatactttcactaatgagatgttgaatcttactgaagaaagtgtaaatgaggcatgggaaaaatatgtagaatggacttcattacaaggtaaaaatgatgagtaa

SEQ ID NO: 26 - DNA, 3006 bp, Asteriusvirus sp.
  source 1..3006: mol_type = genomic DNA
atgtatatcgatgcttatatggaacgtaaacgtactggtgatattcttcatgtagttgaacgtaagaatggtaaacgtattctacgcgaattagatccagtatatgaatattatgttgaatccccacaaggaacacataaaactgtttatggtacaatggctaaacattttgagtttcaaactcaagctcaaatgaataaaagtgtagagcaacacaaaagtgaaggtctacgtatttttgaaagtgattgtaacattacatttaaaacattagccaaagaatatatgggaaaaggctcacccgatttgaacatcgtgttcttcgatatcgagactgatttccataagaaatttggttatgctccaccatcagacccgtttaaccgagtaaccgctatttctctatatcaatcgtggactggaaaggattatgtacttactttaccacctgctgatatggaaatttatgaagcacaagatattgttcgccaactaaatgaagaaacaaacgatcctaacagtactgtaattttatatacagacgaaaaggaaatgtttatggaattctttagtttaattgatgattctgatgttatttcaggatggaatagtgaattctttgatattccatatatgatcaatcgaactaaaaaaatcttcaatgaagcaacaactgctcgttggtgtttatggaataaaaaaccaaattcccgtgaagcagacaactttggtaaaactgttcaaacatatgacttggtaggtcgcgtccatcttgattatttggctttgtataagaaacatgctggtcaagttgaacaatcttataaactagattatattgctgaaaaagtaactaaagaaaataaagtatcatatgaaggttcattggataaactttacagagaggattacattactttcttgcgttattctaaacaggatagtattcttcttaaaaagattgatgctaaatgtgactatatcaacctacacaatcgacttgcacacaaagaatgtgtacttatcagcacaacaatgggttcagtagcactaatcgacactgctattatcaacttagcacatactcgtggtgaagttgtttttaacaaagcacctaaagatgatcttgagtttgatccagaaatggaatattatggtgaagatggtgaagatgaagatgagaaaattagtgcaaaagcagcaggtgcatgggtacaagatccagtactaggacttgtaagtgaccttgggtgtactgactttaactctctttaccctacagttctacgtactttgggtatgagtactgaatgtattcttggtcaattacgtcaagattacaccgatgcgtatcttgcagctaaaatccaagaacagaagaacaaatctaaatctaaatcatttgaaccagattggactgcggcatggcatggtttatttgctgctgttgaatttacaatggttcatgaaaagtcagaagaaacattgattgttgatttagaagatggaagttcttttaaagcaacgggcaaagagctatatgatattatttttgcagaagatagtactatcgtacttagtgcaaacggaacactttttgataagtctaagtctggtgtaattcctgacattctaactcaatggtattctgaacgtaaagctcagcaaaaaatggttattgactacaaacatatgtatactgatggttgggagtttaatggctatgaaaaagttgaaccactactagcaaactataccccaggtacaatgtttagaactaatattcatgataatgatcctgtatacttacttcgtaaagaaattggtaaaggacaatgggatgaagttgctaagttgattgtagaaaatggtttagtactaaaagatggtcgtattttctgtcctaaagaagaaaaagattacttcaaacaacgtagtgctttctggaaacagaaccaacagattcgtaagattcttctaaacagtctatatggtgcactattgaacaaaggttctcgtttctttgacaaacgtttaggtcaatccgtaacattaactggacgttctatgaccaaacatatggcaagtcgtatcaatgagattactactggtgtatataatcaccaaggtggttcagtaatttatggtgatactgactcagtttactttagtgtaacgcattatctgaaagaacaaggtattccatataatctatctaaagaagagattgttgatatgtatattaaaattggtgaagaagttggtgaatctttcccatcatttatgcatgagatgttcaacactggtattgaaaaaggtaagattgttggtgcagaccttgagatggttggttcacgtggcctattcttgaagaaaaaacgttatgcaattctgaagtactgggaagatgggttccgtaaagatattgatggtaaaccaggtgaaatcaaagcgatgggtcttgaaattaaacgctcagacacgccaaaatacatccagaacttcctagaagagactctaatcgcattactggtaggtgagagtgaacagcagctaaaacagcgtgtacgtgagtttaaggacgtatttaaggatatgcctgtacatgaaaaaggttcaccaaaaactgtaaaaaactacactaatttagaggctgaatatcagctaactggtaagtgtaaagttggtcacgttcttgctggtatccaatggaaccgtctacgtgaagtttatgatgataaatctgttccagaagtaacagatggaacaaaagtaattgtctgtaacttaaaagataatcctatgggaattaaagcagttggttatccaattgactgtgttgagtatcttccagaatggttcttggaactaccatttgatactgaaaaaatggaagagattgttctaactaaaaaattagagaatatttttggtattttggatatggatattggtattcatgaaaaaagtactgcgtcagtaaacaatggattcttcacttggtaa

SEQ ID NO: 27 - DNA, 303 bp, Asteriusvirus sp.
  source 1..303: mol_type = genomic DNA
atggctaaatctaaaaaagaagttaaagttgaaattcgtgatctaaacgatgaacaacgtaaacgtctcggcgatgcactgaacaacattgtcgtacaactaactttcattgatgataccaaagcatccttatctgattttgtttctagtgtttctgatgaacttggtatcgatgcatctgatatcaagcaagctgcacaacgtatgtacaaaggtgattactttgacaaacaaaataaactcgataatatcgaaactattcttagtgttactaataatcttccacaagcagatgattactaa

SEQ ID NO: 28 - DNA, 582 bp, Asteriusvirus sp.
  source 1..582: mol_type = genomic DNA
atgcaactaacaaattttaagatgtatgaaaaagaaggtggtaatcctaattctttgtatatgatgtccgatgaaggtatggattggtatgaatctcgtgaattgtttgacattaataaagcaaaatttatgtatgatactaatggtttaattgtttcagcatcatataacatttatgatctagtacctttaggttttagtgtttctgaaattgaatatgatggtgatattaacaaactttatggtatggtttacgatggaaatactattcatgactatattgaaactaaagaagaaaaaattgaacgcctaaaaaatgaattatctaatttgaaatacattgcaattcaagaacttggacacttaaaaactgctatggatcttgagttagcaactgatgaagaagctgtattgtttgtaaaattgaaagattatgtaacgcaattgaattcaatcaaaccagcagacatgatcaagaaaacattttcatttccagttaaaccggaaaaaaatgagacaacacgtaaagacgtgatacaattaagtcatctcaccgattgtggtgaggtggcatttttttga

SEQ ID NO: 29 - DNA, 1011 bp, Asteriusvirus sp.
  source 1..1011: mol_type = genomic DNA
atgggaggggaaaatggtacaattaccaaacaagtaccaaaccttaaccaaaacgcgtacttaaaagggatatccacatcaggtgtaactaaaactgatagtgttattggtagtagcggtaatattagcggcacagtattaagtgttgcccaattaccatcacactcatttagttttagtgggaccacaggggctgctggtcgtcatggtcatagtcaagcactaaaaggtatggaccgtagtggtctaaatgcgttaacttcaagtaatgataacggtataccaactgtaatcaataacattaacgaagcaccagaccacattcactcatttagtggaaacactaacacacttggtggaaaccaaccacactatcatggtattagtaacattgatgtggaacactttaacgttgcatatctatataacattgctgaatctaacgtcgcattgagtgaaaaagttgcaaacactcgttatgtactaaaaactggtgatacaatgactggttcattgactattgcaaacagtgcgtcaattaagtcaaatgatacatcattagttctatatttccgtaacgcaagcggtggtgagcgtgcggcagtgtatcataactcttcaaataatacattgagattacgttccggtggagcagaagttactgtaaactcttctggtactttagctgctccatcattaactgtttctaacaactcagctactgttggtggtaaaaatattgttcgttcaattaacggtactgctgctgatgctagtggcaacgttactttgcaaattagtactaataacgtacaaagtattcgtttgagtgcacgtattgaaacaagtaaaatacctgattcttcatggacatatacaccagaaggtgcatttatggatggcgtatggatttctgttaatggtagttcaggcactcacttagaacgaattagttatcgctatgttcaaatgcaaataaatggtaactgggaaacagtacgtcaacaataa

SEQ ID NO: 30 - DNA, 663 bp, Asteriusvirus sp.
  source 1..663: mol_type = genomic DNA
atgagcataagttttaataacccattggatacaatgaccagtactggtgctaatggatctttagaactaatagtgcttggtggtacaccaactaacccaagacctattcgttttaattcgtcatcagttattataccagtacaaacgttacctactggtgaacaaggtgcaatggtttttgatcgaaacgaattagttttgaagtatcataacggtacaagttggattgcagtatacgatactgatactattttggaaccaattagaatttcattagatgaagtaaacagaaaattaaatttaaaagtagaaagtgtaacatacagtagtagtactgttcctagtgcaagtattagtggaacaaacttaaacattgtattccctactgcttctagtggtggttctggtccaactggtctttacacttcacttaaaccaggtgctattacacaatattcattgacttctggtcaatctgttgctagtatacgtgaacaaatgtcaggacaatcgaatggacaaagtgggagaaacggttcacaaggtgctccgtggaaaacgtccgacggttggtgttttgctgatggtatgtggtggcaatgggaggggaaaatggtacaattaccaaacaagtaccaaaccttaaccaaaacgcgtacttaa

SEQ ID NO: 31 - DNA, 309 bp, Asteriusvirus sp.
  source 1..309: mol_type = genomic DNA
atgtcacagatatgttatgttataataaactctgcatggcctgactatgttaagattggtttcacttctaaatctgaaatgacagagcgtttgagaacgtatcagacagctaccccgtttcgtgattttgaagtttatcatgaagttcactttgaagacgcacgtttagctgaaaaagagatacataaaaggcttaaacaaatgaatgcaactagacaaccaaacacggagtggtttaaaatgtctaaaaagatagcagcaaacatcattgattctgtgtgggatgatatggataatgacttgctatag

SEQ ID NO: 32 - DNA, 351 bp, Asteriusvirus sp.
  source 1..351: mol_type = genomic DNA
atgttaactgtatacaaatttaatagagaagagtacttgaagagtcagtactcaaatatagaaataaatgttccttatggtacgttagttggatatgatgaagccactgaaacattgtattataatgatgatagattggattatagtttagattctttcatagaagatatacttaatacacatactgaagatatgttgtatgaagaatacatcgatcattatagagaacgtatgtcggtgctgcattctgatgctcctgtgctaaacattgcacaagaaccatcggaatttcagccacataatccttttcaacgtttaattgatattggtttaaaattcactattagttga

SEQ ID NO: 33 - DNA, 1155 bp, Asteriusvirus sp.
  source 1..1155: mol_type = genomic DNA
atgcttgacagaatatttttaattatatataattatcaaatcgaaaccaagttgagtaaattgaaaatgttaattgaaaatttcaaaaagaaaatgaatgaaaaatatggtatgtatggtgagtttgattttaattcgatgatttttaaatctagcaaaactaccttgaaatgtaacaaatgtggtattgaaaatacaaagtctgcaattcgtcatatctcatgtacttgctctaactgttatagtaacatgtcccagcgttccaataatgatgatttcattttaaaagttgaaaagaaattcggaactgaaaaatttaaatttgataaattggtttatgttaatgcaaaaactccagttacaatattctgcactaaacataatggttattttcacataacaccaaataagttattaactggtgctggatgtaacgtttgtaatattaatgtagtgcatacgaataatgaatttataaaaattgttaaacgtaattatggtgataaatttagtttccaaaaaaccaactatattaacagaacaacaaaagtcacagtgcattgcaatgaaggaaatcatgattgggaagttgatccaaaaacattgatacttgggaagtcaggatgtggtatatgttcaggtaaaggtgggagaacaaccgagcaatttattgcagaagctgtaaaagttcataacaataattatgattactcatctgttatgtatgagcatagtgaaaaaatggtcgagataaaatgcaacaattgtaaaaatatttttcatcagcaacctaaagcacatttgacaggtcgtggttgtccaacatgcggtaagtatggttatcagacttccaagcctggatatttttatgtacagaaactaactaataaagataaaaccgtttacaaatatggaatcactggtgatatgaaacgtagagtgaacgaacagagtcgtgattctgaattcgtccatgaagtactagtagaacgtttcttcgaagatggtaataaacccctcttactggaaaagtttatcaagcagtacattgaaagtggagtagtaagtactgaagagttgccgtcaggatttactgaaacgtttgatgaaaagtatctaaaatctgtactggaaattgtaaatacctttaagtaa

SEQ ID NO: 34 - DNA, 1176 bp, Asteriusvirus sp.
  source 1..1176: mol_type = genomic DNA
atgtcacaactactaaatgaatccaaatgggtagcagtaaaagagaaactagttgaaggtctacagggtactcgtaagtctgtaatggaaactgttcttgataaccatcgtaaagttatgctaactgaatccgcaacttctggtgcaactaccgctggtaacatcgctactctaaacaaagtgattctaccaattatgcgtcgtgtaatgccaaccgttattgctaacgaaatcatcggtgttcaacctatgactggtccagttggtcagatccacaccctacgtgtacaatatgctgataacgcacctggtgtaatcgctggtgaagaaatgctttctccatacaaaatcgctaaatcttactctggtgatctaaatgcggataatagcaacccacaagctgctcctactagccaactagaaggtactatgggtcgtcgcgttaacatccgtattctacgtgaaactgttgaagcgaaatctcgtcgtctatctgcacgttggactgttgaatctgcacaagatgctcaatcccaacatggtgttgacgttgaagcagaactaatggctgcaatcgctcaagaagttactgtagaaatcgaccaagagctactaagccgtctacgtgcactacctggtgctgctgctgtaacttatgaccaatctaaagttactggtgttgcaaccttcgttggtgatgagcacgctgctctagctactctaattaaccgtcaagcaaacgaagttgctcgtcgtactaagcgtggtgctgcaaactgggctgttgtttccccaactgcactaaccattctacaatctgctactacttctagctttgcacgtaccactgaaggtacttttgaagcaccaactaacgttaagtttgtaggtactctaaacagcactatgcgtatttttgttgatacgtatgcttcagatgccgaggacattttgattggttataaaggtaatgctgaaactgatgctggtgtgttctattgcccatacatcccactaatggcttctggaactgtaatggaccctaacactggtgaactcgtgaccacatttttaacacgctatggctacgttcagctaaccgacagtacttcatctcttggtaacgctgctgactactacagcaaaatcgctatcaaaaacgttactttcatgtaa

SEQ ID NO: 35 - DNA, 1116 bp, Asteriusvirus sp.
  source 1..1116: mol_type = genomic DNA
atgtctaaattagaaaagcttctaaaagaatcatctctttctgatgaggcaaaacagctaattcaggaagcatggaatgaagaaaagaatacactagccgcagagatgcgtgaagaaatgaaaggccgttatcagcaagatttggctgaactaaccgaaggtttgaacactatggttactcaagtcattgctgaagaaatgggtgctgtatatgaagagaaaaaacgtctcgttgaagatcgtgtaactctacgtaaaacactaagcaatttctctgcgttttcaaactctgttttggctgaagaagttaaacaaatgcgtaaagaacgtaagcatcttcatgaatgcatgggtaaattcgttaatttttctaacggtatcctagcagaagagctaaaagaattccacactgaaaaacgccaactagtagaaactcgcgttaaactacttgctgaaggttcacgtcaaattgctgaagctcgtaataacttcatcaaacgtacatctgaaagtgctgctaaatatattgcagaaaccactcagaagaatctatatgcgttgaaacaagatctagtggaagcaaaacaaaatatgtttggtcgtaaaatctttgaagcatttgctcaagagtttaatgtcaaacaatttaatgaaaactcattgctacgttccctaactgaatcaattaaatctaaagaagatgaaattgctcaagttaagcaagaactacatgaaactgctaatgccgttaaagctgctaaaaccaaactacgtattatggaagatgcacaagcacgtaatgcgattatgtctgaactagtaaaaccactaactgcacagcaaaaacaaattatggaatcccttctagctacttcacctactgaaaagcttaaagaagatttcagcaagtaccataagtcagtacttaacggtactaaagtaaatgaatctgctaccactcgtcaagcagttcagtcttccgctaagaaaactcttgcagaaggtaaagtaatcactggcaaccgtcaggctattgttgaaagcgaagaaatgaccgctgacgatatggcattcctaaaagaactagatgttctttcaggtatcaataaaaaataa

SEQ ID NO: 36 - DNA, 624 bp, Asteriusvirus sp.
  source 1..624: mol_type = genomic DNA
atgagtagtatgattcgtgaatggtcttcattcaatgattctaaagttgttttggaacatcgtgataatggatttggtgggcgtgactgctatcttcgtggtattgctattcaagccgaccaacgaaatttgaacgagagaatttaccctttatctgaaattacaagggcagtaaataacatgaaccagcgtttagctaaaggtgaaagcattcttgttgaatgtgaccatccagaaacactaactattaacctagaccgtgtagcagcaatgattactaaggtttggatggaaggtgctaatggtatggcagaaatcaaactacttgatactgcacatggtcagaatatccgtaaaatgctagaggctggtgtaaaacttggtgtaagttctcgcggttccggtaacgttgattataatggaatagtttctgattttgaaattatcactattgatattgttgctcaacctagtgctccagaagcatacccaacagcggtatttgaatctctgatgagtaagtacggatcaccttgtaatagttctaaaaaaatcactgaatctaaaaaagtaaataatttagattctgaaatatacgattttttcaagaaattaaaaggttaa

SEQ ID NO: 37 - DNA, 834 bp, Asteriusvirus sp.
  source 1..834: mol_type = genomic DNA
atggcgaatttaaaactactacaagaagcaattgcggcgtttgcaaatggcgaacaagatattgctgataaaaaaatgcgtaagtatttcgttgagcaagctcaagaaattaacaaacaactagaagaaagcatggaagatgaagacgacgatgaagattgtgaagtcgaagttaaagtcaaagatgaagaaaagcttgacgaagattttgatgtacaaccagacgaaggtctaaatgctgaaatcgaatacacccttggtgaagaagatgaaagtgcagaagaagaagttgaattctctgctgatgcagatggtgacggtgaagacgatgttgacgttgaagtgaaagctgatgctgatgttccttccgaagaccaatgggaatcaatccaagatgctttccgtggcctacaacaaatgtttgatgaaatcggtgacggtgaagttgatctagattctgaagaagaagtagaagttggtgttgacggtgacgacgaatttgctgatgttgaattcggcgatgaaaaattcggtgaatccttcaaactagaaaaagttgctccagttgataagaaagaaaaagctggcactcattccaaatctccagtagcaccagaagctaaatctccagtagcaggagcagagccagttaaattcgctaagaaaactgaccaagcaccactactagacctagatgataaatctgttctaccaaaagatagcctagatcttggtaaaaatgctcgcggtgaaatgaaagatgttaaagcaccaaaaactactgcatctaattctaaatcaccactaagcaaagcacaacctaaactaaaataa

SEQ ID NO: 38 - DNA, 228 bp, Asteriusvirus sp.
  source 1..228: mol_type = genomic DNA
atgttaaaggacatctttgaatctagcagtgattcaatgtacgaccctgaagatgatcagaacgtatataaaattactgattccagaaaaccgaaactaacattacaagtattaaacaacttaagaaagtaccgtgaatttaaagcacatgaagaacaacgccgcaaaaatgtggttgcagttgtttatgccgctgcaccaactggtgacggttctgggttaatgtaa

SEQ ID NO: 39 - DNA, 1740 bp, Asteriusvirus sp.
  source 1..1740: mol_type = genomic DNA
atgagttggaaacgacatatgacagtgggaaggtctaaactatcgaccatcccaaatcagtccagtaatagcaataaatcaacaggaacgaaaacaaatttcgcttcctatcttcctgttgtatataatggattggcaaatcgtactgagcgttatagtcagtatgagcaaatggaccaagatcctgaaattagaactgcattgaatataattgctgacttttgtacccaaagtactgaagattttggtttaccatataaaatcaaatataaagatgatattggtgatactgaagtaacgactattgaagatcgtttagatgcatggactgaacaaaatgattttaaaacacgaatgtatgaaattgtgcgtggtcttctgaaatatggtgatcaatttttcattcgagatccagaaacattcgattggtattgggtaagtcccaaaaatgttgagcaagtatttgttaacgaagccactggtaaaacaccagtaatttattatatacgtgacgtatcattaaatttgaaagataaagtttttagtaaccttcaagtaggatttgataaaaccgcttatccaggagctattccaacaacaatgggtggtggtggttcagtagctgctggtggtgcatctggttttacaagtcaaggaaataccgctgatccattcagtactaacggtcaattagacgttattcctgttggtgcagaacacgtaattcatctaacactaaatacaggacaagatggggtatggccttttggtactagtatacttgaggacgtatttaaagtctataagcaaaaagaacttctggaagatagtatcataatttatcgtgtacaacgtgcacctgagcgtcgtgtatttaaaattgatgttggtgatatgcaagcacaccaagcgatggcttatgttgaaagatttaaaaatgaaatccaccagcgtagaataccttcaaacaaaggtggaagtacttcactaatggatgcagcgtataatccattaagcattttagaagactactttttcccacaaacttctgaaggtcgtggttcagatgttcaaacattaccaggcggtgataacttaggacaaattgatgacttacgttatttcaataataaattgattcgtggtcttcaaataccagcttcatatctaccacaaggtccagatgatggtggtgtttcattatttggtgatggtgctacacaagctatggcaagtgaattgcgattcaataatcaatgtatgcgttatcaacgtttagttgcaaaacattttgatgctgaattcaaaagatttatggttaaaaatggatataacattagtacttcatcttttgaagttattatgaatccacctattaacttagcttcttatcgtaaagctgaactagatgctaaactaattaatacatatcttcctcttaatgacttgccttatatggcgaaacaaacaattcttgaaaaaatgggcttttctaaagctgatattgttaagaatgaacaaatgtggttacaagagaatccacaagatggttcccaaccttctggtggtgaagaagattccgcaggattgcagtctgttggtattgatgctccaaatgatcctggaatggatcttggtattgatggagaaggtaatttggaaagtgctgatgccgaataccaagagcaacagagtggaagtggtggtttcgaccctaataatttaggcaattctttttaa

SEQ ID NO: 40 - DNA, 2205 bp, Asteriusvirus sp.
  source 1..2205: mol_type = genomic DNA
atggctggaaatacaagtgattacctactccagcagttggttaatcaaactaaagataacaacgatagtttgagtgctatacgtgagttattggctgaaaatataaaaaatgatagaaagaaatccggttctaaaagtggaaaacgtaatggaagtaattcatcaagtactggaaaccgtggctctcgaacaaataacaaagctgatgatggtaaagaatttggaaaaatattcaaatcattatcatctgaagtatcgaatgtcggcaaaactatgatgagtacgtctgcaaacgttagcaatgttgtaaactcactaggaatgagtgcatcttcatttgctggttcattagcaatgatcccaggtccagttggtgcagcagcatctgcattcaaattggttgctgacgctggtttagcagtttataatgtgttaaatgcacagcttgaagtttataatagaataaacagtgctggtgtcgctctatctgaaggttacggctccatattaaaaggtgctggtgcatcaatgatgagtattgatgcatttggtgaagcattacaaactcatagtgccgttgttgcacaattagatggtgcatatggtgatggtgtttctacatttggtaaattattgggtactgtgcaacaagcacaaaatcaattaggtttatatggtgtttctcaaaaaacattaactgatttaactgcacgtaatattaaattccaaaagcaatttggtggaagagaaatgttacgtagtatggatcaagcaaaaagtactgaacagtttatcatgagcatgactaagttcagtaaaagcatgggtgagtcagttgatgcactattaaataaaacacaaaacttagataaatcattagacacacgttcaatgcaaatcgcattacaaaactattctggattatctagtaaagcagcagttgcaacatcaaaagcatttaacgaagcggctgccagtatgggtgatgctggtgcagattttctacgtttaatttcacatcgtttaactattggtggagtaccagatgatttattgactccagtactgaaccaatttgctgatttaggtgagaacttggtacgtagtggtgttactgattcacaagaaattcgccgtcaacaattggaatttgttaaaaagaacaaagaactaataaagcaagatttattaaatcagatacaattaggaaacactacagcagcaaccttcaaccaacagctacttgatatggaagctgcgattaatgatcctaagagtcaaccagcagataaactaacacaattcactgatagattcaatagatggattagtaaagaatttactgaaccatttaataaaatgtatgcagatacacaaaattctattgcggattaccttactgatattgcagaccgtactgatggtgcatgggaatttatcggagagttagcacttgatggttttggtttggttcctattgcgaaagatgcagttgcgtatttggataggattggtggtgagtttgagcagtggttagaagggttaggtactgaaatttttggtagtggatataataaagtttcagaagcatttgatagctttatgaataacctaatggatcttcctggtaaactttgggattctgttaaaggttggtttggtggttcagacgacaaagtaaaagtagaaaacaattctgttaccgatggtgcagaaaaagttaataattattttgaagaaaaaatgaattcatttggtgattatatttctagttcatttgatggttttttaaaatggaattcaagtagaaactttaaacaaccaaaaccccttgatgaatcagttgctgaaaaacttattagtagtggtcttgaaaataagccaagagctactgcgagaattgaaaaatctgaacatgttgcaccatatgtaacgataactccaaaaacatttgacaaatcagcatggggaccaaatgatctaccaattcaagctgaaccggacgattatgagtccatgaaagcgatgataaatagtggtagtagtatggcaaatgctaataataatgccacaatatcagaagacatgaaagagttacttaaaaaacttgctgatgttaatgagcaatctctatctgctgtgcaacagacaaataactatctaagaactatctctgaaaacactcaaggtgagagaaacagttaa

SEQ ID NO: 41 - DNA, 831 bp, Asteriusvirus sp.
  source 1..831: mol_type = genomic DNA
atgaatccacttgctaagtacactaaaattgaagagatcagtactaagttagttacaaacggcgttattccttataaagaaggagttctaggtccaaaaggtgtcaaatgtggagtttgtgcacgtagtgcacgtgatgaaatgacacttaatacccccgatatgttactaaacggagatgcagtatcccgtgttattgaaaactgtgttcctaatgtaattgacgctgatgagttgtatgtaaatgacgttgaaatgcttcttattgctattaaagttgcttctaaagaagaaacatatgatattaacgttgtatgtcctgaatgtgaaaaagaaggtcgatttgaacgtaatctatcatatcttcttgaaactgcacaagcatttgaagaaatcccatcaattgatttagataatggactccgtttagaatttagaccactgacatggaaagaatattcatcgtttgctgaacgcatgttcagtgagcagcagaagactaagtttcttgaaactgctgatattgataaagatgaaaaagtaaaaatattttctgaagtatttgaaaacatggctcaacttaacttcgatatgattggtggagttattgcaaaaattataacaccagatggtgatgaagtagttgaaaaagaatttattaatgaatggcttggacaacaatcgaagggagtacttaaactaattcgtgaaaaaatggatgaagtacttgaaattggtgtatctcatagtatggaagtagaatgtgatggatgtaatcatcaatgggaaattgatggactaaaatatgatcctagtcattttttcgagtaa

SEQ ID NO: 42 - DNA, 210 bp, Asteriusvirus sp.
  source 1..210: mol_type = genomic DNA
atgcttctccagtcatctcctgaagaaatacaagaagtactgaaggagatagaactgaataagtcagaaatcaaaaatgcactaatggaatgttctgtatatatggataacattgactatggaacactccttaatatgccattaatagatagagacttattagttaagtcttttaataaaaaaattaaaaaacaaaacgagaagcactaa

SEQ ID NO: 43 - DNA, 99 bp, Asteriusvirus sp.
  source 1..99: mol_type = genomic DNA
atgaaaggattaattttaatattattggattcatctaactcatttcattcgttagctgaagaatattcgttactacgtaactcatattcatttaattaa

SEQ ID NO: 44 - DNA, 138 bp, Asteriusvirus sp.
  source 1..138: mol_type = genomic DNA
ttgacgggatttgttgaggacattttcatccccccgcaggggaatgaagacaataaaaaagagacaatgaagtctctatttcttgacgctgatggtttcagcatttattgtattgcgaatttcttaaaaatatattaa

SEQ ID NO: 45 - DNA, 105 bp, Asteriusvirus sp.
  source 1..105: mol_type = genomic DNA
ttgctctgtttctctctatcgcagtcatgtgcaacggtcgtcagtcttaatcatcctgacactcacctgaaagtctatacaatcaaacttcaggctgtttattaa

SEQ ID NO: 46 - DNA, 99 bp, Asteriusvirus sp.
  source 1..99: mol_type = genomic DNA
ttgtgctataatgtttgttgtagtaatgacaatcctgttgaatgcagaaatgcatataaattagaacctgatcctatcgaaaatgtagatggcagatga

SEQ ID NO: 47 - DNA, 948 bp, Asteriusvirus sp.
  source 1..948: mol_type = genomic DNA
atggctaaaatgacacaacaacaatttatagataaatcaattaatctacatggtagtatttacacctacaataacaccgtgtatgttaatgcacatcaaccagtgtctattacatgtaaaattcatggtgactttacggtagttcctaataaacatatttccgcaaagcaaggttgtccggtttgttctgatattgcaaagaaagaacgtaaatctaaaaagtcactggagtcattctttactgaagcaaaagaagtacacggtgataagtatgattactctaaagtgtttttcaacattcgttcagagaaaattactatcatatgcaaagaagaaggtcatggtgaatttaatcaggtagttagtaatcacctagctggacagggttgccctgaatgctccaaagcacttattggtttaaagaaaagaacaccagaagatgtattctttgaagattgtaagtacattcatatggatgcatacgactactccaatacaaaatataatggtatgtatgaaacaattacaccagtatgcaaacgtcatggagaattcacagtactggcaactaaacattatcatagaaagcaaggttgtccggtttgttctgacatggaactaaagtcaagaccagttattgaaattcagaattttttaaaagagtatgatataatatttgaaatggaaaagaagtttgatggttgtaaaaatataaaccatttaccatttgatttttatattccttcactgaatcttctaatagagtatgatggtattcaacacttcaaaccaatagagtactttggtggtaaacaagctttagctgaacagcaaagaaatgatgaaataaaaaatcaattctgttttaataacaacattactcttcttagaataaagtatttcgaagatcatattaaaatcatcaaagactatatatcaaaactttaa

SEQ ID NO: 48 - DNA, 492 bp, Asteriusvirus sp.
  source 1..492: mol_type = genomic DNA
atgaaaaagagattaaaaaatcctaaagaagcagcatcttatcgaaatgaactattaaagaagcagaatgggattgaccctataattggtatagaaataacaaaaccagtactggaccattatcatggtggaaatcaacattgtaggcaggttcttcaaaacgaagtgaatggatgggaagggagagtggcaaactcatataaacgatgcctaagtcatttaactgataagccattacatgaagtattgcgtaatctggcagattatcttgaaaggaacaatcatataccagaagatgagcaggtcattcaccacacggcattaaccgttgacgtagctaagtttaaaaggcttccagcaacgcagcagaacgccattctaagcgatttaggagtagttcctggaggtaacgtcaaggaaagaactaaacaagctagaaagctaatcaaggacggtaaattaaatatggtagatataaaaaaagggagctaa

SEQ ID NO: 49 - DNA, 2148 bp, Asteriusvirus sp.
  source 1..2148: mol_type = genomic DNA
atgctaaacattacacgtatatctatgaggaacttcttttcatttggtaatgcaccacaatcaattgatttgaatggttccgacatttcattagtactgggtcaaaataatgatgcagttattgaaggtggtgacagtaccggacgtcgaaatggtgtagggaaaagtgctattattcaaggattagtttttggattatttggtaaaagtattggtaatgatattaaaattccgaacctagtcaataaaactaatggcaaaaattgtgaagtagttgtagagtttgaaaaagatggtgtacaatatctggttgaacgtgggagaagtcccacgtatttcaattttgttactttagggaaagataataaaattgaagatgaatcaaggggagaaaagaaagacacacaagaagatttgaatgaaattcttggtatatctcaattattatttgaacatattgtagtactgaatgctaacgttgaacctttcttagctttatccacacaaaaacaacgtgatatgatagaagaacttcttggaataacacagttgacggaaaaagctgaaatgctaaaggagatgtataaggatactaaacgtttagccgaacaagaaaagttcaaaaatgaaactgtagctgcaagtaatgaacgtattcaaaaaagtattgaggcactacaagaacaggcaaaccagtttgaaattgataaaaataatagagtatctaagttaaatgaagagttgaatatatataaaactttagactttaatgacctctatgaagctgctgacataaaagagaaagctcttattcataacgcaaagcgtggtgaaatcgaacgccgtgtacaagagttggctttaaaatttgatgcatatgaccgtgaacttgaaagatctaaaagagcattaaatctaagcatcgataagctaaaaactattgatattagtgcagaattggaaaatcataatgagttggagatatggaaacagttagagggtattctaaaagagaataataaccaaaaacgtttcaaagaacaaaaactaaactcactaaaaatagctttaaaaggatatgaatgttcaattaatgctgaaattgacaaattatcaacagttgaaaacagcaaatgtccactttgtatgtctgaattggaacataacgaacatacttcttcaattaaagacaaaatccaaagtactattaatgatcttcgagctaaaattgatagttcttcttctgaaattgaaacattacttcaagaaattgatagtattgagatttttgatatgccacctaaacctgtgacatattataatacactttcggaagcacaaatgcatgaacataagcttcaagaattggtcagaaagagtgaagaagaaccaataaacatctatgcaaatgaacttatgtcatcatatgatgaacttaactcatatgaactaatggaagttccagatacattaaacaaatatgaagttaaagagttagaaatgactgtaaattcattatcacagcaattagatcgtgaattgaagactactaacacatttattagccaaattaatactctgaagactgattctttagtaccaatcgattatagcgactataataatcttgataaaatgtcaaatcaccaagatttcttggttaaattacttttaaacaaggattcttatgtccgtaaacgtattattgagcaaaatatctcatatttgaatacacgtctccagtactacatcgatatgtgtggttctgagcataatgtcgtgtttttgaatgatttgagtgttgaaattgagaagagtggtcagtactttgactataaacagcttagtcgtggtgaacgtacaagggtaaacatcgctttatcttgtgctttccgtgatacttacgagtcattatatcaaagtatcaatattcttatcattgatgaaatgattgatcagggtctggattcaagtggtgttcttcgtgtgtggtctatttttcaagatatggctgctgtacgtggtaagaacgtttatgctatttcccacagagaagagttactatctaagactgaaaaaatcctcaaagttgttaaagaggacggtttcagtactgttgaatatgcaacccttgatgatgttttctaa

SEQ ID NO: 50 - DNA, 1032 bp, Asteriusvirus sp.
  source 1..1032: mol_type = genomic DNA
atggctctgtttgataaagcaattacattcactgatattcacttaggtttaaagaataacagcaagcaacacaatgaagattgtttaaacttcattaaattcatgattgatgtagctaaaaaaaataatatcaaagtttgtgtttttatgggagattattttcataatagaagtaatatcaatattcaaacactaaactatggtttacaaattcttcaattattaaatgataattttgaaaaagtatattttttagtaggcaaccatgatatgtatcataaaaacaaacgtgatataacaagtatcaatatggctcaagtttatgaaaatatagaattcattaatgaaattacaacatttgatgattgtactttcattccatttatgattgaagatgaatataagttgttacctcaactaaaaagtaagtatgtttttggtcacttagagttaccaggttacttgcttaacaaaatggtagaaatgcctgatcatggaaaagaaacagaaggttcttttggtggttgtgagtatgtttttagtggacattttcataaaaggcagtcaaaaacaacttcaaaaggaactcgtgtagtttatactggtaattgttttccacataatttttccgatacatgggatgatgcaagaggtgtgatgattcttgaacatggaaaagaacctattttcaagtcatgggataatgcaccaaaatatagaacattcacactttctgaattgttgactgatccaagctattatctacaagataacacaatatcaaaagttcaagttgatatatcaataacaactgatgagattagttttattcgtgatacatttactaaactttataacattagggagtttaatgttgtaactagcaagcaaagtatttcagaattaatcgaagatggtgttagttttgaaagtactgaatcagttgatgagatagttttacagcaaattatggaaattgattcaccaatgtttgataaaaatcttctaatccaaatttacagatcgttataa

SEQ ID NO: 51 - DNA, 840 bp, Asteriusvirus sp.
  source 1..840: mol_type = genomic DNA
atgacaaataggccaaagcgtaaaaagtatctcaataatgctgatttacttcgtgaaatacaaaaaagtaagatttcatactgctggttattagacaaatcatatagtatgtatgattatattgtttttcatgagtcagaaattactgctgagttacttgaaaaagccaaagcagcacgaatcaaacgactaaacaatgaaatgcttgatagtattcgtgaaaaggaaagtatgagtgctaaaaaagctaaagaatatgcagatgaaaataatttagttatcactgatgttccaatcgatgaagttgttattcgtgttatcactgatgaacatattccacccgacactagagttaactttgaaccattcaagcattacattgtagataatgaaggaattctctatgaagtatgtcgttctcattggaaaggagatcttgaaactggtgaattcagtactgttcatggtaaaattacaaatgaactagggaagatgttcattaaacttgctgaggaaatctctcataaatctaattacagaaactatacatacttagatgaaatgatgggtgatgcaagaatacaattagttaaaaacgcacttctctttaaagagagcattctttataaaaaagataaaccagcagttcagctaaatcctttctcttactatacatcattcgtaaacaatagttttcgttctatattgaatagtgagaaaaatgttcgaaatatacgtgatgatttacttgaaatgcatggctttacgccatcacatacacgtcaaattgaaattgaattgaacatgattgaaaggaaaaatgaagatggctctgtttga

SEQ ID NO: 52 - DNA, 93 bp, Asteriusvirus sp.
  source 1..93: mol_type = genomic DNA
atgtatttatacgtgggacaaaatgctttttggtgctataataacattgatggtacaaggattgtacctattggatttaaacatggagagtaa

SEQ ID NO: 53 - DNA, 732 bp, Asteriusvirus sp.
  source 1..732: mol_type = genomic DNA
atgattgatcgtagaattcgattacgacctaaagccgcaggtgctaactatgtatatggtgatttcggggatagctccgaaccaacactactttcgtttctgcgtccaactaatgggttggtttggactgtaacaccaacaattactgaacaaaggtcaattcagtatgaaacacagtctcctatacataccaacagtaactataacaactataagaacactactaatacagttttcactattcagggtgaattttatgcaaatacagcagcagaagctatgtatgcgttggcatgtgttcattttatacgttctgtttcattgatggattttggtagacaagctgcttcggctaataaccccgaactcgcaattgcgggtgcaccaccaccaatcttacttctaagtggatatggtcgttatacatataatgatattcctgttattttaaaatcttataattttacttacccaaatgatgtttcttatattcaagttccattgaatagtagcgatagtacttttaatttatccgacatggatagtagaaaattcttcgaacaacttagaagtactggatatatgaacccacaagatgaagtttgggttccacaaaaaatctcagttatgttacaacttgaagaacaaccaacatcggattatatgactaaaacgttcaacctcaatgcattcaaacgtggtgaactattacgtaaaggaggattcatttaa

SEQ ID NO: 54 - DNA, 315 bp, Asteriusvirus sp.
  source 1..315: mol_type = genomic DNA
atgtccaactatagtcaatactcaccttacgctaaggtgaaacaaacatggtatcttgggtataatttaccacgtgatattgttccggctgatactgatgatttttatgagatcccattgaaatatgaatatcaaccttggcgtttagcatacgaaatgtatggtaatgaacgcttatattatattttcgcattgttaaatccagacatactaggagaagatcctatatataattttaaaagtggagtaacaattagaataccagcaaatcaaagagtacagaattatcttaatggtactcgaaacataggctaa

SEQ ID NO: 55 - DNA, 2250 bp, Asteriusvirus sp.
  source 1..2250: mol_type = genomic DNA
atggcagatttacgaagtacagttgataattttcaaaatgatattacaagtattactggtaaggctaaaaccaccacatctaatgcacttgatagtttgaaagctacagcaaatacattacaaaatgatgtaaaaactattacaaaaaataattacaaagcaaatgtaagtaatgtagtatcattaccaaaacaaagtgctagtgttgatcaagtttatgaagatctcgatttaagtcagtttgtaataccgtatgacaataaattgttgaaatatgataacccaacttggcacttttgtttatttgccttagataaagatgattttaaaaacttttggctttacccagatgcagaagtgcaacgacatgtgatatcagaaagtggtgttactggcaaatataatatcactagtgtacaaatgacacaagctggaccttcaacaccaggaatgacaacaaactattgttttaatacagcagtacttaatatgtctgaaaataatagtatgagtctatatgatgaattaatttcgttaagtaacaaacttagatatcataaatttatggacttgccattgatattggaattaaagtttattggctttaataaaaatggaatacctgaaattatcccagaaacaacaagacgctggtcagttaaaattaatagtgttactgcaagtgcctcacaaagtggtagtactatgatgtatactatgaacttagttcataatagagcagctttagttgataacattgaatggaccttaaaagaaccattcaattgtactgctgaaaactttggtgacttctgctttgatttagaagataaattaaatcagatggctgaccaacaatatggttatcttagatataaatttggtgaattatccgaaggtaaatttttcgaatttaaagtagcacctgatttgcaagatttgtttataaactatgattctaaacaaatggcagaggccggaacaactaaaagtggtgcacaaggttctaaaaacttttcatggaacccaagtactcctatatctcgaattattgatgacgttattgatacatgtactgtacaagccgatgatagtactagtgtgcgtcaatttgtaaacattataccagttaaacaatacgttggttttgataattatcgtaatacttctgtttataaagtaattttttatattgttagatttaaaataggtgatattgttcatgaatcggatttacaacctgaaaatttcacatttgagtacttttttgagaacgcagaaaaatacgtagatcctaatgatcaaaaaccaaaaataaacatgaaaacttataattatcaatttagtgggcttaatagtgagatacttgatttggatttgaaatttgatcagcaatttttcgtagccactacacgtaaccctggtccgatacaagatgtagcgaaccatgcaggtacacatacatcccaagaactcaatattcaaggtgtacaatacaatagtataccagacgcatgggcaaaaacaagtgatttacgtgtaactcgtgatttaggagggatgttaacacaagcccaacaacaattgttaactgaagttgaaactttagcaaaaaatcaaatgcaggttggtaacgcagaagaacaagaccgttataataactatcaagtcaatgttttacctcaatatattgaagattatgtaaccacttatgaagaaaacgatggcggtactgatggtgttggtcaccgttatggtgaagtgttcacaatgccaaccgaagcaactaacaatgaaacaactttatccgcttcgttaaacgataacagcagcacatatgaaatggatagacgtaaaatacgtgacaactattacaatagaccttttttgtgtaaactcgatatgcgtgtagtaggcgacccgtactggttagggtggagtgattactcttacttacaatatctagaacaagtaattaatggtgaagatatggaaattaacccagatgattatcatgtagcaaattatataacatctgaagcgtatctattactaaaattacaaccagtaatatcaataaatgataacactggtgttttggatattaatacaccaaccacatttaaccaaacaatttatcgtgttaataaaattgttcatgattttggtgcaggtggttcttttacacaacaaattcaagctgcaattgtaattcgtgcactcaaacgtcacgatagtatagttgattaa

SEQ ID NO: 56 - DNA, 2664 bp, Asteriusvirus sp.
  source 1..2664: mol_type = genomic DNA
atggcagatacaagtaaaaagtatgcacaacagcagttgggtcgttttgacccatcttatccgcagttagcaactgttatggataacagagatccaactaaatcaggaaaactgaaagtttggatacaaggttctcaaagtgataaaaactcaaaagaatcatggatagaagcatcttacatgtctccttttgctggtaaaacaccaggtattccaagtgctgatgcatatggtcaatatccaaaaggatacggtttttgggcagtaccaccagacgtagggtgtacagttgttgtaatttttgcacaagcccgtacattccaagcatattggattggttgtgtatatgaccagcgtatgaatactatggttccaggcatggcaactgaagtaagtaattatggtggaactgatatgccacttcctgttactgactatgatcgtaacactatcactaccgatatgcaagacaaatatgctaacgttccaattatcgcaggtcttaaaaagcaaaaccttttatatgacgaagaagctgggttggcgaatcgtagtagtactcgacaaaccaccagtactgtatatggtatgtcttcgccacgtggtaatagttttattattgatgatggatatactgaagaagaattaacagcaccaacgtgggatcaagacccagatggatatcaagatacacaatttaataacccagtaaacgatacacgtgttggttctcgtaaaaatgaaggtgtcgtaataaaaacacgtagtggtgcacaacttcttttatcagaagctactggtgatgttcttttaattaaccgtgatggcactgcacgtataaaattcactggtgaaggtgatattgacatgcactgtgataagaatattaatattcgtgctggtcaagatattaatattactgctggacgttcatataatattgaaaccggacaagatttcaatgcacgagttggtgcaaatactaaattagatctaattggtgctcttgatgcaaaagttggtggacaagttgttgttaattctggggcagaccttcgtttagttactgctgcatcattacgtatgcaaagtggtagcagtactgatattacggctggttcaaatgcttctatttctgccgcaacatctgcaaacctaattgggtcatcatcagcaattattagtggtggtggtcaaacattaacagttaatagtggtggtaatagcggtactgctgaatttactgcaccaaactttagaacaccatctgctggtcttaatgaacacattcatgatattgctgcatgggttaacgctgaaaatcatggtagttatgttgaaccaccaagacaaggtggtggaagtggttctagtgaatcaccagtacaaccacaaccagcaaatgatgtatcaccagaattacccgtagcacaagacactgaagctgttcagtttgttaactatacatcagaaactgaacaagtgcaatctcaagatttaatgacatctgaccctggaatgactggatatagtattacatatgaaggtttacatatgttcatgccatgtagtggtactattcgccaatatggttattgggggaaaggtgttccaacacaaagtggtgggaagtcagatcgttctggatgggaaatacaatgtaaaggtgacatagttgcacccgatggtggtgtaatagtaattactaatggtgcactgttaatacaacataagtcaggatataaatctgtattttataatattcaatctgatttattaaacaaagatgttgttcaaaaaggacaagttgttggtaaagcaaatggtgttatacagtttgaaatacgtgttacatcagctaacgtgcttggttttagcggttcagttgatccgggtctattttatgcatctcaaactggtactggttcggacgcagccaataaaacattaattgcaggaaaagcaaccaatcaatctgcacctcaagcagtagtgcaaccttctgttgatagtgatgaattagtagttactacaaaaattaaaacaattggtacaggttattcacaacgtggttcacgacatgttcctcgtcgaagaagaacacaaagaagtggtgtttcaactacgccagttgagcaaccaacttataatataggtaatgttgataaaacagccatagattggaaagttgttccaggtgatgctcagtttatttctgaattaaaagaatatgagggtacattacaatatcaacaagcaaagggatattatcgtaatggtaagttctggcgttatttagatagtcgtggatatccaactattggttacggtcacttaattgttagcggtgaaaacttctctgatggaataactgaacaacaagcaaatgatatgttagttcgtgatagtagtaaagcaatttatgatgccaaatcaatttatgcttcatataacatgaaaactccttatcttgctcaacaagtactatgccaaatggtatttcagatgggtaaaggtggtgtattgaaatttaaaactatgttatcagaaatggcaaaaggtaattataaacaagcagcggcacaaatccgcaattctgcttggtatcgccaaaccacacgccgtgcggagttaatggctcgtcgtttggaggcatgtcaataa

SEQ ID NO: 57 - DNA, 489 bp, Asteriusvirus sp.
  source 1..489: mol_type = genomic DNA
atgagtaaatgggaaattaaaaatacagatgagcaattttttaaggaaattaaagaatttgaaggaactattgcttatcagaaaaaacttggttattttaaaaatgataagttttgggtatataaagacagtttaggtcttgatactattggttatggtcatctagttcttcctggtgaaaatttcaagaatggtttgaccgaagctcaagctgaccaacttcttctcaaagatgctcaaactgcgtacaatgatgcaaaatcaatttatgaacaattcggtatgaccgcaccagtacaggtacaacgtgtattatggttaatggtattccaaatgggaaaaaccaaagttttgaaatttaaaaaagcaatgaccgcattaggtaaagctgattacaaaactgctggtaaagaattgcgtgatagtacatggtataaacaaaccacttcacgagcggaaaagatggcacgtatcgttgaatccgtataa

SEQ ID NO: 58 - DNA, 396 bp, Asteriusvirus sp.
  source 1..396: mol_type = genomic DNA
atggcagttgtttttaaagggttttctacccctgtagttggtagaactgaaacattgtatgatagtgaattggttcgccaagatttaatgaatcatttcaatacaaaaaaaggtgaacgagcatttgatgctgactatgggtttattgcatgggatttgctatttgaattggaaggttataatactatcaaccttttagaagcagatgcccgtagaataattagcttagacccacgtttaaatcttaaaaaattacaaatttcaagaatagaatatggataccaaatgaatattgtattacagtacgtagtattggacacattagaagaacttactatagtatttgatgcaagaagtaataatcgaatggcaacatattcagtttcgtctttataa

SEQ ID NO: 59 - DNA, 765 bp, Asteriusvirus sp.
  source 1..765: mol_type = genomic DNA
atgaaatatgcaaccactagaaaaaaacaatataagtttataactaatgctataaaagttcatggtatccgttatgactatagtatggttaaatatcataatgccaaaacaaaagtatggattggatgtgaaaaacatggtttttttctacaaacaccgaatgaccatacatgtggtaaaggatgtatgaaatgttctattgaatataatacaaataggcagagaagtccacaactttttttaaattttaagaaaaaagcaaatttaaaatttaaaaataagtttgattacagcactgcaaaatatgttaacaacaaaacgcatatttcaataatatgtcctattcatggaatgttttttcagcgtcctgataatcatttgaatagtagatatggttgtgaaaagtgtatgagagaaagcacacaatctaaagcggtatctgatattgaaaatattctatctaaatttaaatacgttagagaaaagagatttactgaatgtaaaaacatattaactttaccatttgatttttatattgaagatttaaacttgtgtatcgaatatgatggtgaacagcattttcaatgttcggagcattggggtgggattaaatccctgaaacaaactcaacacaatgataaaattaaaaacacgtactgttctgaaaatggaataaagctacttcgtttgaagtataatgaggactatatttcagtactaaaaaagtacttttatgataattttaacatattattaaaggattaa

SEQ ID NO: 60 - DNA, 3462 bp, Asteriusvirus sp.
  source 1..3462: mol_type = genomic DNA
atgtcacaacaaaaaagacagtctaatttatatagtggtgaggattggactcaagtatatgaaagtttctataaaatcaatctaaccgcctatgatttcgatactattcgtcagagtatgattgattatctacgtgcaacttacccagactcattcaacgactggatcgagaacgatcagtttattttcattttagatacgatttctatgctaggacagaacttggcatttcgtatggatttgaacacacgtgaaaactttttagatactgcaactcgtcgtgcatcagtactaaaactagctaaaatgatttcttactcaccacgccgctcatatccaggtcgtgcagttgctaaattaaccgaaattaaaacaaaccaagatgttcgtaatagttttaatgaatcattaaaagataaaattattcgttggaatgacccgatggatgctaactggtatgaaaactttattctagtaatgaacagttcatttgtcagtactaaccaatttggtaatccagtcaagcgtattgatgttaatggtgtctcccgtcaactatatcgaatgaacaccatcccaatgacagcacccagtattccatttattgcaactgtcaatggtgaatctatgacatttgaagtagtgaatcctgacattacgtctgttggtgttgaagaacgacatccagaaccacaagagcaaaaatatattgtttatcaaaatgatggtaatggatttagctcaccaaatactgggttttttgtatatttcgtacaaggtacattaacatatcaagattatcaatatgctatccgtgaagagaaccgtatacaagatattaacgttgataatatcaacgaaactgatgtatgggttcaagaaataaatgaagatggtattgttcgtaccaaatggacaaaagttccatcaatggaaagtattgcatataacactgttaatcgtcaattaaaaacaatttttgctgttactactcgtgataaagaccaaataacaattaagtacccagactcaagaagtggtgttgttccccgtgggacgttccgtgtatggtatcgtgttagtaatggtaaaacatataacattaaaacttctgaaattcaaaataaaagcgtaaaatatacatatcgtacaaaaacacagtcaagttatgaatctagtacattggatatacgtttttcattacaatatgagtccgaccgtgcacaaagtgctgaaactattgagcagattaaagcacgtgcaccacaaatgtactatacccaaaaccgttttgtcaatggtgaagattataatatagcaccacttagtttaggaaatacagtacttaaatctaaagctattaatagaatttatagtggtcaatcaaggttcattgatatcaatgatcctactggtaagtatcagaataccgacgtttttagtgatgatggtgcattatatcaagaaaacacgcaatttaatagatcgttattgctcccaactacaaaaacaaatgctagtattgttattgacaatattcaaccattgattggggaaaatgcagtaatacaacgttatcaagcgtatccatccaatacaattggtattgaaatacaacaagcatggactccagtgtacaattcaaattacacaaccaatacatatggcagaattttgggttcgtctggaacagtgtatggttcgtatcaggtaggtactcttattaaattttctaattctggtactacgatatgggcaagtgttgtaagtgtgttagataatggtttttatgtactaagcacatctgttcctagtggaatgcaagcaatagagtacatattaccatatagaactagatttaacacagttgaagttcagtctatttcttctatgttggataaaaaaaccgattttgtaattgtacatgataaagaaacaacttcatgggttccaatcgaagcaagtactaatgacgatactattgtgtataatggtaatgaagttttaattataataaatgtaaaatatacagcagaaacttgggaatttgatgctaacggtattgaatatatttttgtgggtggagaaaaagtaagattttactttgtatcatctaaaaaaattactgatataagtactggtacagttcaaagtgataagattgaaattttatcatctaacactactagtagtagtaattcaggattgacaagtaatatagattttcaaatttatgacacaattcaacaagagaatggctatctagatggttctcgtgttattgttacatctaggaaagtagatagtaatggtataccattggaaccaaaccaatttaaagaaattgttcctacttggactggaaccgatgcattaaaatatggtggtattttggtatttcaggaaaatagtgatttcactatatcagcactgtcgttaccaaatgataccttcacacttcttgattcatcgtggtcttatacaatggaacaagctttggcagagccgaatgcatataaaagaactgaatttgttagaaataacgcaattcgttcaaccacattgagtggattatatagtaaaggttctggatttttagttggttttaactatgatggtaaatattattttattgaacaaacagttggcaataacaatgatcgtttgggacaactaattagtaatttaacttattccgatgatactggcactgttagtcctgaattggctttttatcgtgcaattaataacatgggaactaatgctgacgagaatcagaagctagattattatggatacaaagatgttacttcacagtacactgttaaaactaatgcacgtactagtatagacttccattggaaacactatgcacctgacgacaatcgcattgatcctagtagaacaaacttaattgatatgtatgtattaaccaattcatataaaactgaagttgacgtttggttgaaaaataatgctgttggtagtattcctaaaccaccaacatcggttgaattaaaagatatgttcaaagatgttgaacaaaaaatagtcattagtgatagtatcatttggcatagtgctgagtacttacctttatttggaaacagtgctgctgaagattacaaagctgattttaaagtagtgaaattaccaaacagcacaatgagtgatgatgaaattcgtcaaaatgtcatagcattaactaatgaatacttcaatgttgataactgggatttcggtgaaagtttctattatactgatttgtgtacttacatacactcacagttaggtagacatattagtactattgttatagttgcacaaaatccaaattcaaaatttggttctctatttgaaatcccttcacgttcagaccaaatattcttgagtactgcatctgttgaaaatgttcaaattgttaactcactagctaaaagtaatattaatatcggttcttaa

SEQ ID NO: 61 - DNA, 9972 bp, Asteriusvirus sp.
  source 1..9972: mol_type = genomic DNA
atgactaataattttaagtttcaacctacacagatggctgaagcagtacagaagaagctttttattaaaagattgcctgagtggatgcaaggcttagaagatattcaaaaagtcagtgatgatgttattcaacaatggtttaatccggctgaaaacgaattagttgacggctatattggtgatatgggttctcctgccgctgctggtaatatcttcttacatgaaagtactgtagcacgtcaactttatcagttgtccactgcttacgtctcaaaaaatgatgattcgacaattcgttcaattcaattttatgatgatctagttggatacatgaatcattatggagcactaaccgataatgaaagccgtttgttcaacggtaagttttatgcatggactccagctattaacccaaataaaatgaacaattttagctcatatctttgggatactaaaaactcttataatattacttcacctgattacattgtaatggaacgtggagcacttaatggtaatacatggtcactacaaaacttttggtatactttaggtgaaacattagaagatggctcaatattaactgaagaattaatgcaagattcacgttttattcgtgcacgtgcaccaattattgaatataataaaaatattgagctaattaactacggtacaaaattccgtggaactgttgatctgttctctgatattattaaacctgaagatatcgttcaaaaagatattaatagtggtatacgtattgatggtattattccgcaagatggaatgcgtattctattcaccagtattggtaacaatggtgaaaacaatagaatttataatgtatatgtgaaaaaaatgcaagatggtactcgtgtttatggtttagcactagatccagaagaagaaaccgaatcacgcccaagtggtgaacctcaagatggtgatgttgttctaatcactaaaggtaatgagtatggtaatagttctatgtactggaatggttctttgtgggttcgtgcacaatcaaaaactagtgttaacgtattccctaaattccaactttatgatcgtaatggtatcaaacttgacaacagtactacatatccatcaagtaactttaaaggttcagagttgtttggttttaaaataaattacaactatgcaactgatagtgtatatggatataacattgaacttggtgattataattattacatttatgaaaactttttacaatcccaacgttatacctatgaccatcttggaaaagaagttgaaattgatggtttatactattataacattattgatgaaaataatgaaatgaatcttcaaaccgattgggttcgttcagaagagtactctaaacaatttgtaaaacaaactccacaagtcaaacgtactgatatgtatcgtgtattcagtactgtttatgatatggaagtttttaaagaaccagttgatggtatgtatgcatatgttattgaagttgatagaacatatcagtactataaagctgaccgagaaacttatctagattggcatccaattactggtgatggtgttcagattgtaaaatatgaccatacattcgaattggcacaaaaagttttagataatgattctgatattattgaagttgtggttgatggtgttgatgtgtccaaatataccaaaaatgtttcaaaaggtcaagtacaaagcatcactctagatagtactgtagaattggatgaagattctgttattcaaatcagaacttatagcagtactgtaacacctgataaagaattaggtgcttatgaagttccaatcaacctacaaaataacccatataattctaatattatatacattaaccaaggtgactacactttacattttcaggatattattcaaaagaacattacacgtggttcttctgatgatttcaatgactatgaagaacgtttggctaaaggattggttaataatggcgtaggtactaaaattatccaaaatgaagcatctatgcttccattgatggcacatactgcaaatgaagatattgatttatttgaagcaactatgtttatgcaatctgaatattttagattcattaataaatttaatacacaaatgcttcgtatgtatgatgaaaatccatcagactttttacaaaatagtgctgcaaacattgttgatgcaattttaactactattaatatgggacgtgatagttcattcccattctattatgataatgttggaagtacttctggattcattcgtgcatttataccaccaacaccacagttcttaggtattcttcaagcatatgtaccagaaaaagcgacattcctcactgctggtagtaaaccaagctgttataacatcagtcatactggtattatttccaaagcataccgtgttatcaatggtgttgataaaatggatgatgttgtatatgaattagaaaatagaatttttaatagtattgataataaattcaaagatgttgattacgtaccagtattgaatagtgatgaccttttccctacaccatatttcactaaaactgaatatagtgctgaagagaaacaaacattattactacgtggatacattaacttcaccgcaactaatggtatcagtaatagtacacatgattatgatcctaacaattggagaacttggaactatactggcacttattatgtagttaatggtcaaagtactgaaattcctgcacgtggttcatggcgtgccatttacactgaccaatatggtacatatcgcccagctacccatccgtgggaaatgtttggctttacacaacgtccaacttggtggaaccaagaatacgaaccaacggctgttcaagttggtgaacgtgatagtgatgttgtatatgtatatgaagcacttgttatgaatgagcaaggtgatttagttcctagtggtctttgggatattgacggaactattggcgatagcagtactggaactattttatttggtgatcgtcgtggtcaatatgacaaatataaaagatttggtgtacagccattcaaaattacaaaaactggaaataaaacatcttctggtattgatatttgtgtggttgaatatattgcacctgaaattttaggtttagtgtctggatctttaaatcatagagcagaaccttggacatatggtgatatgggtgacatggaatttacatacatgaacactacattgtttgcatatgaccaaatgatgcttttgtataaagctaaaccagcacaatttgctaactatttctgggatacccgcaatgataacttaaaagaagtattcactgatggttcacaattcctttatggtgatacacgtaagcgtattaattttgataaaaatacagtagttcatggtgaaaatagcacaagaacaattggttatcaaatgtttgtaagtgaccatttgatgtatcaaaataaaaatattaccaccaagtatggggatgtagttcgttcatcttatataaatgttggtcataaaattggtggttttactaaagcagatcagctaacattcaatgctaaatctttcggtcttatttcacaagaaaaccaaaccattggtcttgttcgttctaataatatccgtgatgagcaaatgagtgcgatcaaaattacttggaatggtagtgcatatcagattgatggatatgatctagttggtgctaaatttaaatataaacttcccgtaaaaaatggtagaaaagtaactcttaaattggaaaaccgtaatgttgttcattataatgaatggaagtctgaagcttcaattgaatatggtaaagttttcaatagttaccaagaagtttatacttttatttgtggatatggtgaatatcttaaagaacatggttggatttttgaagatgtaaatgatagtggtgctcaacaagattggaacactattgctaaagatttcgtgatctggagtcagaattctctagtaactggtgaatttatttcttgtaccccaagtgctgcaaacgctaaatttggggcagactttggttcagtacaatctattacgcaaaataatggtggtgtatggtcattacttgatgataataaccaaggtattcgccaatatgaaattgaaacttctcgtattggaaatatcttcactgttagaactttagaatctaataaacgcattgcattgattcgtttaagtttgtgttcatatgaacatgctgttatttttgatgataaaactatttttggtgattacatttatcagccaacatatggttctattcaagaactaattaaaatgtatggatatattactggttcatggactggtcgcctacaagctcctggatttattatcttggaagctggaacactaccatcatttgaaaaattagtgtcggatttccaacattattatgatagtgaaactccagtaagtgttgtacaattacaagagttgtcaaaccatttgattggttatcaatctcgtgattatctacagcgtatgattagtagtgatgttagtcgtgttgatttctataaaggattcattcacgataaaggtactaaccaagttttagaacgtgtacttcgtgtttctaaatcatatgacactgatgaatataaagcattacaagaatgggcatttaaaattggtacatatggtaatattgatggtaagaaaaaccttcaatttaaactaatcaatgaccaatttaaacaacaacctcaaatggtttcttttgatgtaaatgcaacttcaaatggtaatggtaatcatattgtatacttcggtgagcagggtaaagatcctcgttggattacacgtccaaatggtaagttctcattcccaatgcgtagtggaagaagtgaaaatatccaacttccagatattggtccagtaacattggatgaagtatcgtacacaacaaaagatttcagtactgcatataatgaccgcataacttatactaatggtaaaggtgaaaatcctgaatctgtgtggatgtttaaagacggtaatggtttgtggaacatttttgaattggttgatactaatgtgcaaatggtttctataacacctattgaaaataccgatgtgtatgctgaacaattttgtaaagtaactttaactgataatgtaccacttgaagatggtgattattattattttgttgatgaaactaactttatgccagatactttaacagtagaaagtcaatattatactgctggttctgatcctaaagttatggtagttccatttgacacttctattgatattgaatttactgatccagatacacgtccacgtttgtatcgttatgtatcacgttttgccagtactgatgaacgtcaagcttacattgacaagaaatatagttttaaagcaccacaaagtactttatttgatcgtccaacgacatatgatgaacgtactaacattactgagctatatctaaacgtttatgacccaattaatggtgttattccaggtgcggctatgcaaaacgtaacatatacttcaccagttgatcctgcacagtataatagtaatggagagttaatccaggcttggggtgctgataaagttggtcaagtatggtggaacactagcactgcattttatttggattatactcgtgcaatttatgacgcagacggtaatgttgacattgatgcaaccaatgaatacaaacgttacaactggggtcgtttattaccacatagtacaattgatgtgttagagtgggtttgttcaccagttgagccatataactgggacaaatactgtaaagatgttgctaagaaaaacaaaaataatactatgtatctaccaagtggaactgcacttgaagataattatagtacatttttggaatatgatagttcaactgatagttatgtgacaaaatactatttctgggtacgtgatacaatttatgtaccaccactacataccagaacaaaatcatgtactgacattgctcgtattattaaagatccaacacagctaaacattccttggttcgctccaatcaatgaaaactcgtttattcttagtaatatgcaatttaaagtgaatgatgataccagtattttaactgtttcttattacatggatagtactgaagttgttaaacatgaccagtatcaactatgtaaagaaggtgacagctataactttaacccactaatttgggattcaatgtggaactcactaattggtcaagaaacaactgaatcaggttctgtgattaatttattatatccagatgttgataacggtttaggttcaaacaaaacttggttccaaaatgttatagaagctcgtagaaactttgtagaaagtgctaataattattataggtcacaaaacataaccactaatagtgttgttatggaagatgtgtttaatgttaaaaccactgaagttaacccgaatgaagtttctttccgtgtattgtcttacaataatgaattagttattgcagttgaaagtgataaatttaaagaaaatgacgctgttattttaagtactagtggatatctaccaaatccattaacttctagtgctgtttattttattcacttcgacgaaaatggatatattcagttaatgaatagtccagcaaacgcgggtagtgttgttactataacgttagagaacaaaggtgagggacaacataaaatgattaaacaatctgattatgttgaatcactaggaacttcattggacatgactcagtactggtcatatgctgattggtatgatgttgggtatgatagtaacacgacttatactcaagagtcaagcttagaagatgctaatactaaaaactaccaagttggcgatattatcagagttaccgatagtgaaaacatttggacattgtatattaaatcacaatcacgcgattcaatttattggaaagcgattggtcgtgaaaacagtacagttgaactcaatgatatgctttacgcagattatagtgttcataatgataatggttcactaagcaatcgtgaaatcaacgttcgtaaagcactagctttactcaaaaattctttcgatttacatcaaagcgaaattgtttttgatatggtcaaatatgtacatgttgaacaaagtgttgtggattgggtatttaaaacatcatatatctatattgttggtttggaacaatcattagttcaaaactattcaaacgataatttgattaatcaaattgttgaatattttgaagaagttaaaccttatagaactaaaattcgttcacaaatagagcaaaagacatctgatgatgatttaataaaaggtctatgtaatgatttagatcctaatggatatattttcgttgacggttcttggatcaaaactgaaaaagatatttgggattatgagtacgctcaatttaatgaaattacccaaaaatgggaacaggtaggttcactaccaagtgatttcgttacaccaaatagaagattccaagaaattgatattattatgcattatgataatattcagtgtaaaccaaatgaagatttggcaagcataaatgaattagtaagtgttaataacaaatatcaatccaatgaaaaggatgctgttagtaactatgaattacaacgttatatatattctttcccagaatatagtgaagaaactttcgatcttcttattgcttatcaaatgcaaatctactatccagaattggatgtaacactaggaacagcatatggcgttaaccagtggtataaagaccatgcggaagatttagaagcaactgatgaatttactgctacattggagcgtgtttataaagaatcaacgcagaacgatatgtttactgaccttagacaatatgttcagtataacacattggcaaaccgtttgaaactttataaagatataagtgatgagaaaattcacgatgaagttggttgtggatttagtggacttacttataatgacaatcctagtactagacttccattaggcttttcttctagtaatgattataactatggatattttgaaataagcagtgaactgtatcaaaaatatatttcattaattaaagataaaaatcctgacgcatcagactatgaagtaaaagttaaacttgaagttgagtatggtgtatatgtttatcgttatgatgaagtcggtggtgatacccgtttctatactgatgctattcacgtattagcaggtatgagagggttattcgacaaagacgctactgataagtacgaaaaagctgaagagattcttagtaaaaccccaattgatatctatgcaattacaatgattccacgaaaatatgtttacttaaatgttaacggtgtatatcaaagtatacctgatgaacaaagtattgatgatttcatggaagattattttatcacaaatggtgaaatgattgaactagctgaaataaatctagatgatttaccactagatcaaaataacccaatgtattcagattatcaatatatacttgatagtattactgaagctaagtacttcaatgatatgaatgcatttgataacctagcattagaatctcaaacttcttcaataaaatgggaagttaaagatgatgaagttgatccttatattgtggatatatctgacataaacccttctgggcgtgatgttggtcaaattagatttacagttgatggatatgggtttgacaatgtatctcttgtacaattacgtgataacagcagatatcaaactgaaggtatggcaattatcaatccatataaacatacagaagcaattgttagtattccttcatatgctaagattgaaaatgatattaataaaacaacatcgaagtttgatgaaaaatatttctatcgtgtgagatctattaatagcttaactgaagcagaaatagttgacaatgacctatctgatggtgataaggtgatgattttcactcctgatggtgaagattttgtgagatatcaaaatcacacatgggaaacaatcttgcgtgtatctaacatcaaaaacaatacaactccgatcctattcactgtaagaaatacaggtaaagaaacgattgaattgattgatgagagtactggtgcagttctccgttatgataatatcactcttgcacaacaaaatgagccagtacagcctcttgcattgaacattgttcgtgttagaacatttgctgacccagaatttgtgaagaatggtatcaaattgtacgaacaaaatagaaattacacaattgatgtaattaattatgatgttttctacgatactactttaaatggtggtaagtacaatgacggaataacaccagatgacgttgacgtttggataatctctaacgaaatatttgatgttgatggaattactatcgacaacggttataacctaccaattactggtgcgggagttcttagtgaattagcaagaactaaaatgactgatagtttagaaatcaacgttattgaatatgattcaagtgttattcaaccgtttagaaataatgaaggtatatgggtttatggatatccaatggttgacggtatgtacatcggtgttgttggtggcacggttactaacatcacaaccattagtgaagaaaatacaacctatgtttctcaacctaaatcaataagtccttatagtattagaaataatgttttatccggttctgccgcgaacatgaatgatattatatcgattggatatgaaaaagttgaagttagaaatgcaaataatttactccgtggagtaatgtatagtgcagaacatgattttaaacttaatactacatattcattcaatggaattaatttaggtaattatgatatgttaaaacgttacacacaaaatagttacactatagatctttcagtatacactgatagtctacaagttagtggtaatgatattaaaaatatattattagttaagtaa

SEQ ID NO: 62 - DNA, 2289 bp, Asteriusvirus sp.
  source 1..2289: mol_type = genomic DNA
atgaatcttactcaattgttcaaaaaaagcgacgaactggcaacatctctaggtcatacattcttgactattgaccacgtaagtgccacagtactgactattgatagcatcaagaacgtatttgaagatatgaacattgatgcagacaaactgcacaaccgcctgatgaactatcttaaaaatacaacagttccacatgcaccaaaaagtgttaaagatgaagacgcgaatcgcacttcacttctagtgaatcgcgttgtacatgagctttctaaaaaatcagttattgaacaactaaaaagtgatgatttttcgattgatgcatattttgttctattcgaatgtctgtctttccctaacacagcactagaagctgcgttgaaagaagaaggtgttagctgtactgaagctgcacgtgcattgcaaaaacacgttgagtcacttgataagggtatcaacttacaaagtattaatgacgaaccgattggagataaaaaagtggcccaacagcagcaatcatctaaacaaaaaggtttggaagactatacaacgaatctaactgctcttgccaaagaaggcaaactagatcctatgattggtcgccagaaagaattgtctgcattgattgagactcttgctcgcaaaaccaaaaagaatgctattcttactggtgaagctggtgtaggtaaaacacaaatcatcgacggtcttgcacaagctattgctgacggcaacgtacctgaacacctgaaagacgttgaaattctttcactaaatgttggtgcattgactgctggtactaagtatcgtggtgagtttgaagaacgcatcgacaatttgctaaaagaactaaagaaacgtgaaaatactattgttttcattgatgaaattcatattatggttggggctggttccgcaagtaatggttctatggacatgagcaatatgcttaagccagcactttcacgtggtgagattcgtgtaattggtgcaacaacatatgatgaatatcgtaaaaatatcgagaaagatagtgcattaactcgtcgttttatgaaaattgatgtagttgagccgtcaattgatgaaactcgtgcaattgttaatggtttgaaaccaacttatgaaaaattccataatgttgagttcacaactgatgcaatggatgctgtaatttctctcagtgataaattcctgaagaataagcacttcccagataaagcaattgatctaatggacgctgctgctgcaaaagttcgttcacgtgacaacaatagtaagcttattactgccaatttgattcaagaagttgttgctggtattgccaatttggatatcaacgtggttgcatgtactgaaagtgatcgtatgcgtaatctaccagatgcactacgctcacgtgtatatggtcaagaggaagctattcaaaaattagttgataacgtgatggtagctcgtgcaggactgcgtgacaaatctagtgttcagggtgcatttatgtttgttggaccatctggtactggtaaaacagaaattaccaaagcattagcagatgcaactggtgcggaactgattcgctttgatatgtcagaattttctcaagaacatactgtttctaaactaattggttcacctccaggttatgttggtcatgattctggtaacggtttactgttggataaaattgagcagttccctaatgcagtactgttacttgatgaaattgaaaaagcagatcgtaaagtactactaaccttcctacaggttttggatgaaggtcgcctgactggttcacaaggtaaaactgtatattttaataacgtaactgttattatgactacaaaccttggtgcggcagattcaacgaagcgtagcattggtatgagcggtagtgatactgcacaagacaaggcaattaaagcattcttgccaccagagtttattaaccgtattgatagtatcgttacgtttaaagacctaagcagtgaagctattgacagcatcattgataagttcatgggcagtttgaatgaacaagtcaaagaccgcaatgttaaagttacattgacaaaagctgcacgtgaatggcttgcgaaaaatggggtaaaagttggcatgggtgcacgtccaatgaaacgtaccattgaacaaaacattcgtgtaccactagctaaagaaatgttgtgtggttcacttgtgaatggtggtaacattacatttgatgttattgatggtaaaatcggtattaaaccgaaacgttccaaagctgtagataaagcactggcataa

SEQ ID NO: 63 - DNA, 102 bp, Asteriusvirus sp.
  source 1..102: mol_type = genomic DNA
gtgattcacgtcactctaattaataaacattatatcacattcttacggtttgtctacaaggtaaataaagatatacccgatttattttggagacaatcatga

SEQ ID NO: 64 - DNA, 840 bp, Asteriusvirus sp.
  source 1..840: mol_type = genomic DNA
atgacatatagaatgtggaaaaaaggtagaaccaatgattacaagttcattgattctgccattgctgaacaatacaacattggtggagttgacatgtggctttatgcatatgtcggtccaaaacaagttgctgacaacactgacttatcctatggaggtgattatacatcttcaggatcagttgtgtcaagtattggcgatttaatttttggtgacacaccaaacagaaactacaaccttgaagctatcacacttagttgtgtctatcaagttcaagaagcaactccagacttgaaaatcccaggattgttctttaatttcaacactatggacatcacaatccattataatacaatgatgcagcgtttaggtagaaaaatcatgccaggggatgtgatagaactaccaaatttacgtgattttgatgtattgggtaaagatacaggtctaaaccgcttctatgtcgtccaagatgcatttcgtacatctgagggatactcggttacgtggcaacatcacatttataaacttagagttaaaccgctaaccgactcacctgagtactccgatttactcggtaacaataattatcctgataatccagatgaccctaataatggtaatggaaataccgatgatggttcgtcggaaaacagtaactatggcaatgaaatggatatcatgaaccgtatcatcatgcaagctgatgatgaagtaccctatattcattatacaaatgaacatttgtatgatgatcgacctgatacagtagatttatcaaaatatatgcttaacggttatgattttccagaagaacctgccgatggaatgtatttttga

SEQ ID NO: 65 - DNA, 564 bp, Asteriusvirus sp.
  source 1..564: mol_type = genomic DNA
atggatggtgacttcttctttaaagaaaatgacgcagatgtgacaggttatacgttgtatcaatatgataaaagtgctaaaaaatggttaaattgtgatgtagaatatactaccagtgatgttccacccgaagatgtggaagatttttgtattttttataaagaaccacacatttatcagtataatgatgacaagtggggggaaccaaaggtaacttatgtcaatgaaccattcacgtccaattgtgtatatggtaatattgattcccaacaagattatcgtcctaaaattccaccagcacgaggtactgtccctgaaggaaatatgttcccaactgatgcagtagatggtgactatttctatcgcaccgattatactccagttacgttatgggaattcaatgcaactaagaattcatgggttatttttgattatggtggaagaaaaccgtgggaaggtgcagacttagcacttacacagtttgtaaatagtgataacaaagttccattacatgacgcagttaaacctaatactgtttatcgcatacataaggacacagaatga

SEQ ID NO: 66 - DNA, 1344 bp, Asteriusvirus sp.
  source 1..1344: mol_type = genomic DNA
atgaaaatagattattattatgacggtcaatttcgcagagtactgaaacatcttatcagagtttttggtgaatttcaagtacaaaatggtgttgatgctaatggaaacccaaaatacaaaaaggttccatgtcgctatgccgatatttcaagaatggcagcagcaattataaatgggaatagtgaaaatgttctcccatcagcacctataatgaccataagtgttaatcaactaaagttggatcgtaaaaatattcgttctaatgccaacgaaactatagtaatggggtctaacaagtcccctgctattaatgagtacacaaaagatcttgacacacaatacaaaattgtaagacataacccagtaccttggacttttacgtttgatttgaatatttgggtaactcaaactcaaactaaaatggaattattcgaacaaatctcaactttgtttgcacctagtatacaacttcaattatctgataacccgttagattggacatcgcttagtgatgttgaactaatagattgtcagttttctactcgtggttttccacaaggaactgacccagatttggatataatggttttaacatttgaaacgacaatatggttttctttaccagctattgttgaaaaaccaaaattaattcaacagattactacaaatattaaaggtgctcgtgacgaatttgattttgaaatgggaaattattcagatataataacagatgtttttacaccaaagaacttatgtattaaagttgaagaaattactaattccaagtataatttacctgatacataccaacttaccttggttagccaatcgctatctgcggtttctcccaacggtggaatatattcatgggaaaaatatcttaaatatctagaaccaaattttgatgataaaaaagtagggattaaatttcaacaatctattgaagaagacaacccactaaaaggtcatatagcgtcgtatggtgaaaatgaagatgccaacaaaattatagtacagcttgataatacaaattatactgttgattacactatacatgggtttgtgcagaaagattcagtactttcaaatgcattacctgaacaatattatgtaaataacagtatacataacatcatttataaagaaaccgaaatcccatcaaattatttgtttaaaattacaaatgatggtgcacaattaattgaaccatctactgtacgaaattacatttataataaagaagacaatggttattatagatataatgacaaatttaaatggcataaaagtatcatgcctgtgtatcgtcagggatattggaaaataactttcactgacaaataa

SEQ ID NO: 67 - DNA, 465 bp, Asteriusvirus sp.
  source 1..465: mol_type = genomic DNA
atgaatgaagcggttggtgctatatttttatcaaaaagtactggacatatgatgttaaacttgcgttctgaaagaagtacctattctaacaactgggcatttgttggtggaaagcttgaacataacgaaacaccattacaaggtctgatgagagaaattaaagaagagttgggcaactcaatacctaacattattgatattataccgtttgatgtattttgtacaaaaaatggtaaatttaaatattattcatttgttattgtagttgagaatgaatttgtaccaactttaaatcatgaaagctctggttatgcttgggttagaattggttcttggcctaaaccattacaccctggtgctaaaaatactttacttaacacaaacttaatgaaagatttttactcactatgggaaagtatacgtgaaggtacacagtttgtcaacagtttaccatatagatattaa

SEQ ID NO: 68 - DNA, 1101 bp, Asteriusvirus sp.
  source 1..1101: mol_type = genomic DNA
atgagtgttaactatacaatttatcgaagtaatggtagtgtttatgctaccattccaaataacgttattttaggtccaaatcagccaggtagtaacccagttccattaaatttagttggtagaaacaaagtaagttatggtcaagcatggaatgaaaactttttacatttagttgaaaacttcagttcagcttcagcaccacgtggtaacgtaaatggtcaactttggtatcgaaatactggaagtactggtgagttattaatatcattagtggataatgctagacaaccagcagatatggtaagtgaagcggaatgggcttctattccaatgataactgtattcaacactgtaccagatggtgaaaacagtgttatgggtcgtatggtattaaccagcaatggtgattcacttcgtgttttgatgaaaaacaaagaatggcgtgaaattcaaacatctcgaccagaaaacaaagaatatacatcattattagatattaactatgataatggaaaaaaatacatagagtttacacaaagtaacagtactaaaccaattgcgtattttaacttaggtggtacttcacaagtagatacaaataactggacaacattaactaatggtactggtgtctttgaatttggtagcaactatttctatgaattaaaaattatgattagagaagtaaatgattcttctggtgagatagtttctcttccctataattcaaaaaccttttttataaaagggcaattctatgtagataatcaaggaacttttgttcctggttcggttggggcaagtcaaatgccagacccacgtaggattacacaattagaatccataaaagatgttattaccagtagtcgcccaaactgggacgtaaatattgttattaatggtgtagatccatctatcccaaatcctaatggaacatctaaagctgattatgaaaattgggttatcaattctctaaactcaaataaaaatttaggttttcgagttgatggtagcattagtaatctaactgctggtgaatccgttaaactacaagcatccgtgttgttaaatattacaggtattccgattattggagtataa

SEQ ID NO: 69 - DNA, 609 bp, Asteriusvirus sp.
  source 1..609: mol_type = genomic DNA
atgaaattagaaacagaacaaccaaaactatttgttaaaggtcatgtcctaattactgacgttactgatccatcaaatcaaaaaatcgttttagataaatctaacgctattcaccctgaaaatatgagtactgccattgctaatgcgttagcatataatcaagacagtactggtattcctattggttctattagcgagatgcgttttggtaatggtggtacagtagttttaagtactgggcgtgttacttataaaaaaccacgtgttacatcatttggtggtttgtattcacaaacatatttgaaaaaaatcaacccaagaattacggcaggtattgattcacaatacaataatattacaactgtacatataccaggtcagtcctatactgatattgtatgtatttgtactctagggttaggtgaaccatcagatcaaggtgtgagttcagggacaagcatggacggaacatatgtgtttgatgaattgggattatacaccgatggtgatagtggtattcctttaacacatattattttccacccagttgaaaaaagtgcaaaccgtgttttgcaaattaaatacactgtgcgtgtacaactacaataa

SEQ ID NO: 70 - DNA, 498 bp, Asteriusvirus sp.
  source 1..498: mol_type = genomic DNA
atggcattaagatcaaaagactttctcttcagaagaaaaacaaaagatggttcatggcaagattttcctgaatctgatagctggtatccagctaacttggattatcactggaatgaacaaacgttaccactagcaagtggtggctactatggctgtactacaggtttacatacgatttcatttacactacgtaattttattggtagaatttatgtgttagctacattagctagtaatcctactgatgatgattggtttccaattaaattcactgaaagttgtaattattatcttgaatttactgatatggttattttaaatccaaatggtggggatttaattagacaacaaggaactaccggaacatttgctgaaacagtaactggtaattttacttaccttaaagttggtatagaccgtgattatattagtaagtatccatcagatgtccaaaaaagtttagctgggaagttagaacaaattttaattaactactaa

SEQ ID NO: 71 - DNA, 1116 bp, Asteriusvirus sp.
  source 1..1116: mol_type = genomic DNA
atgacaatttcatttaatggttcatgtaataactccggcatcaaaagtctagttattaatggtgctgggcatttaattgtaacctatgcagataacacaattcaagatttaggtcttgttgtaggacagaatggcgagaatggtaaaaacttttatcctaatgagattggttttgaaattccttccgaacaatttaaagttggtgaaccacttgggtggtgctacttaagcttggctaacaacaccagtactctatactttaaatcaaacgatgcacaagatccgacaagtacatggattagtgttgagtttggtaaaggtgatactggtgaagcgggtaagccgttccacattgatagtgctgggactactttcccaacaactggtctttttaataactatacattttataatactcaagatggtaagctttatttctatcaaagtgtaactgccacttggagtgatggtatccctttccgtggtgaacaaggtccgcgtggtcgtttccatattgatagtagtggtgatcaatttccaagtattgaaaatcttccagttgattattgtttttataacaacactgatggaaaactatattatgttgatgaagtaactacaactacccctccttcaaaagagtggagtgatggtattctattccgtggtaaagaaggtcagcaaggtattcaaggtatacaaggcgaaccaggtgcaccaggtaaagatacaatttctattagaaatacaatagatagctcatggactaacgcactattagttattggtacgtgtcctgctggatatgtagtttctaatattgatgtaaacgttatacaaccttattctcttcctgtaactgatatgtttgtacgttttggtggtgaagcacaagaagatattggtgggactgtaattgcaccaacttcctactttgatatcaatcgtcagatgcgttttattgttaatgaaactaatcatgcagcatccgatgttgatgaaattatttcatgtgtattcaacgattctgttaacaacagtccttatggaaaaatggaaattatttgtactctttcatggcaagctcctatccaaccgattcaagataatatttaa

SEQ ID NO: 72 - DNA, 597 bp, Asteriusvirus sp.
  source 1..597: mol_type = genomic DNA
atggcagtattttctaattttgaaggaactatgcagcccaaattcatattggggaaaaaaggtgcttcaataaattttatcaatgattcagtttctataaaagattatctaggagaacagttcctaccactgaaggtaggaacttcatctgatcctaattcagcagttaacgtaaaatatcttgaagataaccctaatgcattatttggtgttgtaccacctaccgatgatataggaaagaacaataatacgtattttcaaattgatgaagatggtattgttgatatttttgcaaaaagcaatggtacatgggtaaaatcattatacattaataaaaaagttctatccagtaaaaatggtggagatttcatcggacttattactggaggtacagttcaacaggcacagttttatataacaccagaagaatttggtgctggtgaaaatggtggtgatttgagaacgtatataactcgtgcagtgtatgttgtaaacaacgtatatagaattgatattgcagatcctatcataacagcaactgctgctggtgcagcattaaaagccgcccaacccgtaacttacataaccctaccataa

SEQ ID NO: 73 - DNA, 897 bp, Asteriusvirus sp.
  source 1..897: mol_type = genomic DNA
atggcagttttttctaatttagaaggaaccatgaagaagtccttcattcttgggaagaatggtgcacagattaccacaaatggtagtgttgtgcaaattcaaaactactcaggaacacaacttcttccaatttcagcaggtgaaccaactgcaaacacacacttggttacattgggatatttaaacgcacacagtggtggtggtagttctggtatcttacgtggaacaacagcaccatccgattctattggtctagatggtgacgtttactttttggttgatagtactaatgttcttcaaatttatattaaagatcttggtatttggaaaccatttaaaggtagctcaccgggaactgatagctcatatgtaactactgaaatagttcctgtttctgcatttacattagtaccagatactactgatcattatacttacacactaccagaatcagttcatggtagaggttctgatattatgattcaactacaaggtgacccaggtaatgttgcattggaatcagtattccaaaccacagtaacagttagtggtattggggatataacaattgatgtgattggtcaaatcacagattatgcaagtgttaaagtaaacattataggagcaacaacaatgacagtaccttatagtaaattagtaaaccaagccgattgggtttctagtgctggtgatttcacaatcactattccagcatccgaacacaatcaaaccccagataatttgtatatttcaatttatgcaaataaaacacctggaagtgttgcgtcatctccattcgagttggtagtgactgatacacaaattagtagtactggtgatgtaatcttcacttctgatatttctttcagtggtaagattgtcatctccggtaagtaa

SEQ ID NO: 74 - DNA, 102 bp, Asteriusvirus sp.
  source 1..102: mol_type = genomic DNA
ttgtcatctccggtaagtaacaaattaaccaggcttgttctaaataagtctggttttttattatatttgcttttgtcaaataatgtattaattgttggataa

SEQ ID NO: 75 - DNA, 5880 bp, Asteriusvirus sp.
  source 1..5880: mol_type = genomic DNA
atgtactcaataaaaactgacttagatattactggtgctggtacggttggtaaggatcttttagtcaaaggaaatgctgttttcaataataacctaactgtaaatggtactgtaacttttgcaaatgcaacttttactgccattgaatcatcaactgccaacattacatctactttagatgttggtggcaaagcaacactttctggtggtcttggtgttgagggtaatactacaatcggtagtgcagttgtcgggtctgatacagcaacaattaattcaaacgctacctttaacggtactgtatcagttggttctgattttacacaaactgctggtacaaccactctacaagcaactaaagttaaaaacttagaagttgctgaaacaacagcatttaaaggtaatattactgctgatgttggtactactgctgcatttgataaaattactgctaataccgcagaaattacaaatgtaagcaccaccgatattagtagtactggtactgctacatttaaagatgtaactattagtggtacacttggtggacaatttaatctatcagatttgaatgcagtaacattgaacgtttctggtgcatctaaccaacaaggtgcagtaacttttggtgcaaacgtaactggtattaacagtactgctacttttaaagacattcgtattggttctaactctgaatctcaaaccttcagattaagcttcccttacactgctcctggtaaacgcccaactgttattctacaaaacgaaattcagtccgagctaatgtcacctgcaaacttgacagtattgacctctgcttcttttggtaatgcgtcattatcttcttatggtattactggtaatggtctaaacaaattggattatctaacagtttctggtaacaacacacaatctccagacaccccactattggaagttcaaaagggtaaaaccaaagttgctgactttgaagttactggtacagcaactattccaaatattgaaagtacaggaaccgcaaactttaataacattaacgtttctggtctactaggtggtacattccaacttgacgatattaatgcagtttcattgaatgttactggtacatcttcactaactggtgcagtaactttaggttcaaatatcactggctttaatagtactgcttctttcaaatccattagcttgggtcaaaacagtcaagatgcagcagttaaattaggatttggatatacagcaccaggccaacgcccaactgttattttacctaacgaagttcaatcagaagttgtttcacctgcaacattgaatgttctaaaaaccgcaacttttggtaatgcttcactatctacctatggtattactggtaacggtcttaacaaactagattacctaaccattacaggtaacgcaactcaagaccctagtacaccattcctacaagttggtggtaaagcaattcttaatgatgtcgattttactggtacagtaactggcctaactgttgatgtaagtgggcaggatctaacaccaaactcagttattgctgctgcaaatattaaaggtgcaacacttgaaagtactggtaacactactgtgggtgctaaactaactgttactggtgatattgctggtacaactgcaactctttctggtgcattatctgctggttcaataagttctggtgttattactggtacaacttcagtttcagcaccaacaattagtgcatctactgaagtaactgctcctactatcactgctagtgggactttaagtggtcaaactattaacggaactaatattagtgcaacaactcttactgcaccaactattagtggtaatacaaactttacagaaaatgttgatattactggcaacctaaccgttactggcacagtaacgccaggtacgattgatttgagcacaactgatgtaagtgcgaaatctattactactaccgctggtgcaaatattggtggtgatcttgtggttcaaggttcttttgatttatcatcagcagacattagcgttaaatcactaactgcttctggtattgttaaaagtaatgatcttgttaatgctaacgtacttccagtacttaatagtactactgcaacaattaatactgttaatgcaactgaacttgcggtaacaggtccatccaatctagcatctgttcgtacaagtgctgatgttgtagtcggaacaactttaaatgtaagtggtgaaacaacaactgcatctctagttactccatctatttccaatgcaactggtgttacaattggtaataatacttctatcactggtgacttaactgttagtggtgctgtgattcctggatctatcgacctagcatcaactgatgttaacgctaaatcaatcacaacaactgctggtgcaacagttggtggaaacttaaccgttaacggtacagtagacctaactgctgctgatgtaacagttaaatctctaaccagtactggtgcaatcgttagtaatgaatcaactattagtagtgttctacctaaactacaaagtactgatgcgacaattgcaactctaggttctactactgcgaatattactaatttgaatgtaactggtgcaacttctgttgctgatgtaacatcttctggtaaagttacagcagtttctattgaagttccaaccattggtaatactgcgggtgtatctattgctaataatacatctattactggtgacctaacagtttctggtacagtaacaccaggtgctattgatttaacaacaactgatgttaacgctaaatcaatcacaacaactgctggtgcaaatattggtggtgaccttgttgtttctggtactgtagacctatctgctgctgatgtatcagtaaaatcgctaacaagtgctggaatcatcactgttagtagtgctgaaggtgttaacctactaccaaaagtacaaagtactgatattactgcaactacagtaaatgcaacaactgcggttgtttcaggtgatgtatctgctgcaaatgcaaatatcgctggtgctgttaatggtgcgtctgcaacactatctggtgttggtactgcacttaacgttactaataatgcaactgtcggtggtgcacttactgttggttctattacttcagcggcagaaaatgtatccattactaaaaatacggctatcactggtaatttagcagtatctgggactctcactgctggtgttattgatttgagcactactgatgtttctgtaaaaactttaacttctcttggtgacgcaactgttcgtggtaacttaactgttgatggttctattgacctaagttctgcaaacatcgtcggtgtaacactagaaagtactggctccactacagtaggtactgatttgatactaactactggtaacattacaggtagtccatctatttctggtaacttaggtgtaactggcactacaactttaactggtgcaacaacagtttcaaatacattgaatactgctggtaaactaaccgttaatgctggtggaattcaggttgttgcaggtgatatacaagttgattctggaactattactgctcctagtgctaatatttctggtagttcaacacttaatagtgctactgtaaccactacactcgatgttactggtgctgcaagtatgaatggtggtttaactgcttctaccttggatgtaacaggtgatagtacagtacaaaaactaactgttaaaggtgtatttgttcctgaaggtggtttggacctttccggtgctgatcttaacgttaatagcgtaactgctgcaaccacattaagtgttactggtgctagtactctaactggtggcgtttccacttcaacagtatctgcatccggtaaggtaacctcacaagaactaagtactggtacattggatgtaaccacaaatggaactgttggaggaactttaggtgtaactggtaaagcaacagtggggtcactagattcaggtgcgatctctgctacatctggcacatttagtactactctggatgtaactggtgcagcaacctttggtaataatgttaccattactggcacattaacaccaggtgcattggatttaactagtactgatgtagttgctaacagtctttctgttgcatcaaccctacattcagatggcaatgcaacaattggtggtacattaggtgtaactaatgcagtaactgctccatcaatcgctcttaatggtgaaggtactgcgttggcagttactaataacgcaacaattggtggtacattaggtgtaactagtaaagcaactgttggctcactagattcaggtgcaatatctgccacatctggcacatttagtactacactggatgtaactggagcagcaacatttggtaacaatgttaacattactggcacattaacaccaggtgcattggatttaactagtactgatgtagttgctaacagtctttctgtagctacaactctacattcaaatggtaacgcaaccattggtggtacattaggcgtaactggtgcagcgactgctccatctatcacccttaacggtgaaggaacagctttggcagttactaataacgcaaccgtaggtggtacattaggtgtagttggtgcagcaactttaggttcactaacaacatctggtgcagttaaaactggtgctaacgttgtaattggtacaaaaattggtgatcaaccagaaacagttcagattttccctaacacttacatcgcaggttccttgcgtgtagacggtggtatcaacgctgatatcgatgttagtggtcaaactatcgaaccatatgcggttgttgctgctgatactattagtgcagcaggtaatatcacatctggtgcagaattgatttctaaatctgcaactattggtgatgttggttcacaaaacaacaacttaaccatcaatggtaacgtagttaacaatggtaactttacagtaactggtgttctaaacgcaacgctaaaccaagctaactctgatgtggctgttaaatctttaactgcaactaacagtgttgctgctggtactagtattaccgcaggaacaagcattactgcaactggtttactaaaaggtaacactcttgaagtaactactactggttcattcggcggtgcagttactatgtcaagtggtgcaaatatcacaggaactgttggtattacttctggtaacctaactgtcggtggtgatatttctgcaactggtactgctacccttgctgctacttctgtaactacaattactacttctggtgctgctactcttgctagtgcatctgtaactggtgcagcaaccgtaggtggtactttaactgttactggtttaatgactgcaaatggtagtgttgttctaggtgacgctgctgctgatacattaactgttaatgcaacatcttctttcaaagaaaatgctgtgtttgacaaaaatgtaacagttactggtcaactatcaactactaatgctaacctaaccactacaacagtaactactaaaaaatatgatgttattcctaatcaagtaacttcttctgttattgcaccaactggtacttggactcctgatggtactagcaacgtatactttatcacccttgatcgagatacaactctagcaccaatcactggcctaatcggtggtggtaaagcatcttcagtatacatttatgtgaaacaagatgcaactggtaacagaaactttactactgatggtacttatgcggttgttgatggtactctaaacaaaactgcaaactctgtgaccatttaccaaatcatttatgatggtgtaagtccagttgtagatatgtttattgcacaacgtacagcttaa

SEQ ID NO: 76 - DNA, 780 bp, Asteriusvirus sp.
  source 1..780: mol_type = genomic DNA
atgttcacatatgtgaaaggaaattcaaaagaaaattatgaattgggtagcattatttctaacccaattggtgtaaaaggattgaaagaacgtccaggtgctacaccagaagatccacaaacctatcgttatctttatagtgatattagaactctttatggtatttcaagtaaagatggttctccagtggaacctaatgatgctgttagaaaagaagaaggtttttggtggttagtgtataaaaatattggcaatgttaatgctattgaacaaccattggagtttattaagttaaaagatgataatcaaccagttgttgaatttattgaagaagctacatcagagtataaagcactaacagtactgaaaacataccattacgttgatatgaatattactgatgtgaaatatgatttaaaatccagaactgtagaagaacgtggtgaacgtattaatcgtggttatttgtttaaagaacaacgttatagtactgatctagctggtcgtcaaatgttacttaactattatactcaagtaacttctggtgctgaaactgtctctatatttctcgatgatgcaatagttaaactatctgctgctgaaatgacacaactatatactgaagcatttgctatggtagaacagttgtttgcagaatgtgatcgtcagtgtgctgcaattgatgcagttgatgatttagatcctgatgcaatttataaagcacaacaagctgcaacttgggcatatgaaggtattgaaattcctgaacgtactcgttaa

SEQ ID NO: 77 - DNA, 1854 bp, Asteriusvirus sp.
  source 1..1854: mol_type = genomic DNA
atgattaggtacaataaagaatggaaatcatttgaaggtgttttggattttgaagatggtacaatggcatatcgtcgttttgcaaacttagatgccaatggcaaactccttacttcacaattaccagattcggtaacaagtggtttgcagttcgtaggtacatataatccaatccctgacgacatcgatccacctttggcacaaacaccgctccctgcaccttcagcatcacttaatggtgattattatgttgttcgtggtattatggatgctgcacaagcacactttgaagcaaataacccacaatccactccagttacatttacaccaaccaacccaactggtcagggaaactggattgaaatcctttattatgttgattcaaatccaaatgtttcaggtgcaaaacttgtcacttatgcatttgctagaattattactgcttccatacctagtactggtcatgatggtcttaaaaatttagcaacagatgctgacttaaccaaaccatttgcttcaggcgttccaatgaaccaaaccgcactatcagatggtgattggatcattataactgaagataaaaacatacgtctacgccagtcaagaacaagcatttctgctgcttctgtattatatgacaatacagtaatgattgcaaaccatcgtcaatttagaacgaacgcaggaaccgtacaaacatccatagataacgttgtgattgaatgtttacgtagaactggtgattccatgtataatgatggaacaagcggctcagggcgttttggtgtggtgtatggtagtgcagcagcaccagcattgacatttaataacaatccatttgatccaaccaataacccaggtaatgatcctgcaaaatggtcagacgctaatactggtatgtttcatccagcagatgatgcaattggtttcagtactgcgggaactgaacgtattagaattaataattcaacattaacattataccaaacaacttcaaccccagcatcaaccccagtactaagatttgataatgcaaccaatactaatgttggactaagtgctagtagtaatattatttcatttagttcaatgaataaagtacaagttgaatttaaaaatggtgaaagtgcgtttcatggtaatattgtggttgatggtacaagcacattgactggtgatacatcagctagtaatatcactgctagtggtaatttgaacattcaaggtaataccatattaggcgatgctgcttcagatacaattacagttaatggagttagtacgtttacagcaaacactaatttcaatggaacaactaataaatttaaaaatataaatctattagctaatggtataattacattagaaagtactactaatcaaagtacaatccaattagttagttctgatttaaaactatcaatgggtaattatgctgatgtaagtatctatgataatggaactataagaacacgttttaatagatatggtatccaattaccagtactagcaactattgataactctgttggcgttgatggtatgattgcatactcaaataccgagcgtacttcaatgcaaaaagttcaaggtcaatgggttccgattggttcaggttcagtgagaaccgatgcttttaccatttcatcttgggtattaagtggtaactactacacccttactgtaacagcctcaaacatcgtcacagcagagatacaggaacaggttagtcctggtgtctatactcgtgttgaggtcgatagcgttacgtttaacggcactaacgtagtgtttagtataccttcaactcctgatgtacgtttcgacggaagaacattggtaacaattagataa

SEQ ID NO: 78 - DNA, 930 bp, Asteriusvirus sp.
  source 1..930: mol_type = genomic DNA
atgaaacaactacaagaactatatcaaaaaattctagatgaaggtgtagaaagcgttgaccgtactggtgtcggtacaatcaagttaatcggtcaacaaatgcgttttgaccttaaacaaggattcccagcagtaacgacaaaacgtctagcatggaaagcaatgacttctgaactgttgtggtttattgaaggttcccatgatgaacgccgtttgtgtgaaatactgcacggtactcgtgatccagaaaagaaaacaatctggactgataactaccttaatcaaggtgtttcacttggatatagcaatggcgaactaggtccagtttatggtaaacagtggcgtgaatgggaagactataaatttagttcaagtacggatgaaatacaaaaactaaaagataaaggttataaagttttagattatactggatcacatggtgttgttatgaaaagaacaactgaccaactccagcaacttattgatggtatcaatgctgacccatacggtcgtcgtcacattctaagtgcatggaacgttggtgaactagatgaaatggcattaccaccatgtcatagctttgtacagttctgtgttgtacaaggaaaactaagctgtattttacatcaacgttcagcagatctatttttaggcgtaccatttaatattagtagttactcactactaactcatatgattgcacaaattactggtttagatgttggtgaatttatttggaatggtggtgattgtcacatttataaaaaccacgttgaacaagtaaaagaacaactacagcgaaaacctcgtgaattacctgaattgtggcttgatcctacaattactaatattgaagatttcacaatggattctttcaaattagtgaattataacccaatgccaacaattaaagcaccgatggctgtataa

SEQ ID NO: 79 - DNA, 594 bp, Asteriusvirus sp.
  source 1..594: mol_type = genomic DNA
atgaaaaagaatgaattagatgaagcaataaaaggtttatctaatgtatgttttagtggcggggcagcaggtgctgaccgccttttttctatctatgcaaaaaataatggatttgaagttattaatttttcattcaaaggtcatgagcatagtgtagatgaaagtactatattagaaataccatccaatattctatctgatatttctatattaaatcaactaaacattgcatgttactcgttacagcgaaaagtaccaaagcctggttcttatgtttacaacttacttgcaaggaatagttatcagatacttaatacagaaagagtatattgtattgcaaatatcacatcaccaactaaggtaagtggtggtactgcatgggcagtacagatgtatatggattcagttgaaaatcctgaaatttattgttatgatatgaattcacgttcagtattttatttcgatacagtactgaaagaattcactaaaacatactctattcctgctccctacggtaactggacgggtataggttcacgtaatgcaacagaaaaacacatggaacattttattacatttttcaaggaagtataa

SEQ ID NO: 80 - DNA, 657 bp, Asteriusvirus sp.
  source 1..657: mol_type = genomic DNA
atggcagctattcgtcatgttggtgtaatgcgtaatacaggttctcgtgtttttgttgtttggcgttcactaccagatgatcctgaacactgccttattgtttatcgtgattcactaccagaagcatatgttcacgcagtaactgatattgttatgggtcatggtcaatctaatattgatttgtgggaagtaatgcataaaattggttatctcgatggacgcaaaatgctagatgttctacacaatatgcagcatctacgtcgcgttcgtacttgtgacattgatatgcacactggtggtaataataaaatttctcttgatgttctaaacaaagcattagatgaaaatcaagcaaaagtacaagaagatggtaaagtaaaagactttaacccattcaatccacaagaagcggacactaaagtagaagaagctactattgtagaacaacttctcactgatgcacaaaaatatgaaaaactggctaaagaacattatgaacgtgcatataatttagagccaagtttgcgtccacaaacacaagttgttgaacaaccgaaagatagtaaaacaatttatctagaaattccagaaggtatttcacagactaaagctattgagaaagtaaaacaactatttgcagaacgtaaagcaaaataa

SEQ ID NO: 81 - DNA, 246 bp, Asteriusvirus sp.
  source 1..246: mol_type = genomic DNA
atggaacaagaaaataatcaaattcaactaacccttctagacctaatcaatgctgcaaaaatcatggaagctgctgttgcacgaaacacctttaaagttgaagaactcgttgaggttgctccagttgtatctaaatttgtttcttttgcaaatgtagctcttgaagatattaaagcacaagaagatgcagctaaagaagaagctgaatcacaagatagtgaaactcaagaagataaaggagaataa

SEQ ID NO: 82 - DNA, 1425 bp, Asteriusvirus sp.
  source 1..1425: mol_type = genomic DNA
atgtcagataacaaatctacttccagatttaatgaagtatctccggcactccagaaagaatgtcaagaacgtctggttctggctcgtacatctttgatgttaactgcaccattctttggtgtactcgcttcacgtttacgtccagttcctaataatacatggtgtcgtactctagcagtggatggtaaacatctattctacaacgtagaatttgtaatgggtattcaagacccatctaaaaagaaagaatatgaagaagctattcgtgaaaagcaccctgaagttacagacgaacaattaaaagaaatgactgaaggtttgactgatgaaaaccttgttgcagtaatttgtcatgaaatcctacactgtgcttacgatcacttccttcgtcgtggtatgcgtgatccacaacgttataaccgtgcagcggattatgccattaaccaaatcatcgttcgtgagaaaattggaaaaatccaaagttcatggttgtatgataaaaaatatgaaggtatgaccgcagaagagatttacattcttcttgaagaagaagaagaaaagcaagagggtgaaggacaaggacaaccacaaagcggtggtggtgaaggtgaaggtaaaaatcgtggaacttttggtgatattaaagatggtaagggtaaaccaaaaggtactacaattgaccaacatgacgttccacaagaaggtcaagaaggtggttctagtgaacaacaaaaacgcgattatatggatgatttcaaaacagcaatgatgaatgctgcacgtgcaggtggtacaccagcagaaatcgctcgtatgattaacaacttcaaagaaccaaagattgactggcgttcaaaacttcaacgtactcttcgtagttggttgaagtctgatgcaacttatcaaaatccaaatcgccgttcatggggtgctggttttggttctaatggttcattctatggtaatccaatttacccagggatgaaaccagatgatgatattgatattgcgattgcactagatgcttctgggtctatttctgaagatatgcttcgtgatttcattagtgaagttcttggcatcactaaacaattcaaacagtttaagattcgtatcatgacttttgatactgaagtttatactgtaaaggattacaaaactggcgaagaacgtaagattctggaatatccagtaaaaggtggtggtggtactgactttgaagcagtatgggttcatatgaagaacgacaactacaagcctaaacagcttgtaatgtttactgatggtgaaccgtggcagtcatggggtgatccaaactactgtaaaacactgttcgtgattcacagtaatccaaataaagttgcaccatttggtgagactgtacactacgaatatgaagctgataaaaagcgtcaacgtagttaa

SEQ ID NO: 83 - DNA, 1326 bp, Asteriusvirus sp.
  source 1..1326: mol_type = genomic DNA
atgactactcaaaacgatatcctgaacgttaaactgactccaaagaaagctaaagaagcaatggcactagctgacatgattcaagatagcctgatgatttggggtagcccaggtatcggtaagtctgcaatcgctcgtcaatacgctgatgaaaattacccactgcgtaaagataacgtagctaaaatcgagttcatgaaacaacaaatcgaagctgaccctgaaaatgctgatcagctacgccgtgaactggctgcatttgaagcaaaactaatcgaccaagatactaactttatcgatttccgtttgtctcaaatcgaaccaagtgaccttcgcggtattccagtaccagagaagcttttccgtaaaactgacggttctcttctgaaagaatctgagcttgccgaagcaaaagattatgtagctgaaactgcggtagtatgggctgcacctaaagtactgaaattgtccgaagattggaaaggtgttattctgtttgacgaaattaactctgcaatgcctattgttcaggcagcgtcttatcagctaatcctcgaccgttgtgttggtgagatgaagctacctaagactgcactgattcttgcagcaggtaaccgtgaaactgatggcggtgtaacgttctctcttgctacaccactgcgtgaccgtatgactcacattgagatgattccttatcatcaagattggattaacgattatgcgattgcaaaacgtttgaacccagcaactgttgcgttcatcaacaacactggttctaagtactttaacacacttagcccacaagatccttctcacagcggtggtacttctccacgttcatgggaagcagtagcacgctacgaagatctcaagaaaaataagacaattgataaagaagtgttccgtgcaatgattgctggtcgtgttggtgaaggtgttgcgactgaatacattgagtacgttgagaacgttgctaaactaccagatactatgtctattctgtctggtgaaatcaaagaaatcgacgcaacgctggatatttctgcgaactactttatcactctgaacttggtttataaaattatcgacctgttcaatgagaagcaagaacaacgtctaccagtggaagaatggggtaaactgtgtaacaacttcatcaccttcctagaccataacttctctgcaactcaagcagaactggcagtactggcaattcgtaccatcacgcttcataaggttgcgatttccattaaagatgtaccagcgtttaaagatttcatcgctaagtactctgaacttgtacgtaaagcacgctctcttggctaa

SEQ ID NO: 84 - DNA, 195 bp, Asteriusvirus sp.
  source 1..195: mol_type = genomic DNA
ttgttacttcatgaatcatccgtgtgtttaaaaggtaaatctctttgctgtcttgatgtgaacattatatcacatcgtttcaacttgtcaatcacttttttctttttttcaaactcacatcttgtgacgcttgaaaactttatgtctgatgcttattatatcacatcattctatcttgtcaacatttatttttaa

SEQ ID NO: 85 - DNA, 381 bp, Asteriusvirus sp.
  source 1..381: mol_type = genomic DNA
atgtttccagaaccatcacataacagtactgaatatcaaaataatgtactttccaaagttagggaagtacatgaatcagattcagaaataacagaccgtatgcttctgatgtcaatttttgaaaatttcagaactggcggtggtttacgtcttagtaagtttgggtatggaatttgtaaagaaaataatctttatgaatttacaaaaatccccttgcaaagagaattcaaaagttctataatgttcacatcacttgacagaatatgtacttcaccttactatgttgaaggtcagtacatatacctgtcagacgcaataataatcactgaattaacattgtgttgtgatgattttaaacagttattttctattcatatgtaa

SEQ ID NO: 86 - DNA, 396 bp, Asteriusvirus sp.
  source 1..396: mol_type = genomic DNA
atgcaatataattatcgtgaactagttgaagcgttagacgaaattaccggaagagatgaagacgaaagtttttcagttgaagttgaatccgatgttgtagcagttgatgttcttaaggatattaccaaatgtcttattaacattgttgataagattaaatctggtgaagaccaaaaagaaattgtagataaactacaaaaagcctgtgacattttgtctgatattcgatataatgatgaaagtactgaagttgctgatgacgaagtgttggaagccattgcaggttgttttggtactgaaggtatgggaccaacaattgacaaagaaggtgtacaacactataatgaacctggtgcaccatcttatgctgcacgtcaaggttttgttggagactaa

SEQ ID NO: 87 - DNA, 981 bp, Asteriusvirus sp.
  source 1..981: mol_type = genomic DNA
atggctaaaaaaattaatgaagcacaagttaaaatcgatatcgcaggtttagaatctgatgatttggaaacactatcacgtatgttagcacttgcgggtcaagctgaacgtcaagacccagttgttgctgctccagtaccatcaatggggtctatgactccatctcttccacctattgctccactagatctagattctattggtgctgaagaagaaattggtggaattgaaacttcagttgaagacccactagcagcggcagttgatgatctttccgctgatgttggtgattttggtgctgactcagatgaagttagtatggatgctgaattttcagaaccaggtgtagaaggtgaagaagatttttctcttgaccttagtggtcaacctcaactagaatcagttgaagaagacgatgaggaagaagaagaaattattgaagaagaattcgattttagtcgtatgctatcccttgctggtattaacgaagaagaagacgaagatttttccgtagagggtaatcctgccaccgataaagaaatgaaagatacccaatttctaccagatctaagtatctctgaagatgaagaaccatctaacagtactgattacggtccatatggaacagaagctgatgcagttcgtgatggtcaactaaagactaatggtgttgaaggtgaccattttgttgtaattgcaaaaggcaatcagttttattggagacgtgttgtagatgaagatcttgacaatcgtccagaacctgagtattatgataatgaagggaacgaaaatcgtgttcataaatttgaaccaaaattcccaggcactgcattaggagataacccactaaatgttaatgaaagtgaagaagatgattcacctgaaggtaacattgacttggaagatgattctgatgaagaagtagaagatatttttgaaagtctccaagaaaaatacaagaaatttttaggagacaaataa

SEQ ID NO: 88 - DNA, 1518 bp, Asteriusvirus sp.
  source 1..1518: mol_type = genomic DNA
atggataattttttcagtactgaaactaccacagttcctaatggatatgtatatacgtcacatactggtgcaaaatatgtatttcttgaaggattctggttcaatgacaataatatgttaatggtagaccctagaaaatacccatccatgtacgcaagtgctcgacaacagattgtcgagcacaatctagcttcaaatgaatataagattggtaacaaatatattgttgaaggtaaagagtgtacatttattggtgaaaaccgtttcaattcaaaagatggaattctattaactgaaagtgaattcatcactgaattaatggcagatgatcatcgagtatataatgtttctaaagaaacactacaaaaagaatggaatgcattaaaattttacattcttccaccatatgctgatgatatatcaattccagcaggtatggaagtaagtggttttaaatttgtgccaaagaatcaccgttttgttgatatgaaatcaggacgagcagttgatccagcaatgacccgtaaactatcagatgaaggtatgcgtattgctcgtcagttagcttctaaaaataaactaattccaatcaaatcaaccttagttcaaggcaatacacgttgtgagtggaatggtaaagaattttgtgataatgatggtaatgtagtaattccagaacaaaatgcacatgcaattattaatgcatatcagcaatttgttaagaataacccaagtgattttccaacattaacgggtgaacaagaacatagtgagcaacgttttggttcaggtgaaaagccacaacaagcttcacaacctgctaaacagccagtatttgcaactaaagaatcaattaatgaagcagatgaagaaattgaagaatttgaaagtattactgttcctgacggttatagaatgacttcttctaaaggaaaaacatacgctaagaaaaataacttgtggtatgatatcgaaagtaaaaagcaacttaacacaagtgcttctaaaagtgttgaacgagcagcacagcgtgatattttccgtcataacaattccggtgctatgaaaatcggtacaaaagttaaatccaaacaaggcaaagaatattcgtatgttggtggtgacagattcattagtgctgatggtaagtttataccaaaagcaactgctgctaaattacttgccaaatatgaacaagataaagaagttaaaagtgatgaaacacctgaagtagactctggtactgagcaaattcaatcaaaagaagaacctaagaaagaaccagaatctgaacaaaaaccagacgaagtttctgaaccagaaactaaatctgaaacaattgctggtgatgacgtacaatcattagcttctaaaattaaagagtcaccttatgctaaaaaaatcacagtactactaactcgtggtgatgaggtttctctacttgctgctgacattttactttcaggtaaaaaggatgaaacagtgcaaattttaaaatcattaaataataatgattga

SEQ ID NO: 89 - DNA, 543 bp, Asteriusvirus sp.
  source 1..543: mol_type = genomic DNA
atgagtatacttaatgaaatgttagattatgaagacaatgagttaaatgaagctcgtccttatagtcgttcacaaagtgcagttgatagtgcaaaaggaaaagtaaaaggcttttttggtagtggacagatagaacaaggtgcacaagaggttggtgctgaagctaaccgattgtgggctgagtttaaacgatatgttggacgtaaatatggtaaagctcaaccatcagtaccttacgctgatgtggcacagttttttaaaggtaacaatctggatattaaacatttagggaacaatcctcgtcgttcttttacaccaaaagatgtaggtactgctctattaaatgctgctcgtgatataatgaatgactaccgtgaccaacaaggcggcgaagaaagttcagaatcacaaccatcacaatcgacctcaactgagcaaccagcacaacaagaacaaccaaaagcacaaggttccagtatccctgatgctctacaaaaattaagtccagagcaacgcgaccaactgttacgtatgctttcttaa

SEQ ID NO: 90 - DNA, 537 bp, Asteriusvirus sp.
  source 1..537: mol_type = genomic DNA
atgaatagattacaacaaatcctaactgaaaagaaaccagtttatgaataccgagttaagtttgcagttgaaccatcaccggaacaacttagtaaagtaacacagcgactaatggaccgctatgatgcatttgaaattggtgcacttaagaaaacaatttttatggaaaaaccattagatttctatgaattagattgtggtgaaatttggatgtttgattttaaatgtcatcgtggtgttcaatcaaacgtactaatgtatgaaatcggtaatttactaagtatgaccgaagcactgattcgtgtacgcagtaaagatgaacctcgtcaaattgaaatgactgacctagaagatgatatcgattttgatgatgttgatgagccaattattggtgtagattttggtaaaccagaagacagttatgatttagctggtcaacaacgtgctgaaacagcagttgatgatgcaattgaagcatctaaaaaagacaataaatactctcaatatatgagtgctggttttggtaaaaaggattaa

SEQ ID NO: 91 - DNA, 555 bp, Asteriusvirus sp.
  source 1..555: mol_type = genomic DNA
atgaaatctaaaccacaaatagacgaagcactggggttacctagtgctcaacaatggattgaaatgactggtcaagaaccagaagaagatacagaaatggatttgtatcaggatgaagacaaaactgaaactgaaatatcattggaagatgcaaagattgcaatggaaaagctcaaagcaatgcgtgtacagttgagggaattacctgatattaccgcaagaaaaacccaattggatcgtttagcacaaatggcagaacgaaagtttgaggatatttttgatagagcatttaattgtgaagatcgttttgcagcagagatgattaatgctgcaaactctatgctaaaaatagctcttgatgctcatgcaaaaataattgattcagatgttaaattagttgatctccaacttaaaaaagacaaaatggaaattgaactaaatttgaaaccaaaaaaagaacttgagtctgttggtgacccagatgcaattgaagggcaaactgtagttcacaaaacccgcaatgaaatgcttgcatcaatgaacagaaataaataa

SEQ ID NO: 92 - DNA, 429 bp, Asteriusvirus sp.
  source 1..429: mol_type = genomic DNA
atggctttcaatcaacaatttaacccagcaaagataacaaatactaagcaagctcaaggtatctttcctataaaaaacattaaaaagtataaaagtaataatcaaccaatataccgtagttcgtgggaaaaggacataatgatttcattggataataatccagcagtcatagaatggagtattgagccgtttggtattccttatgttagtccaatagatggacaagtccaccagtactggcctgatttttatgtactatatattggtgctgatggtaagcaacatgctcaagtactagaagtcaagccatacaaacaatgccacatggagttggctaaatccaaaaaagaaaaaattgcagttgctataaatcaatccaaatgggcttatgcaatggaattttgtaaaaataaccggattggagtttaa

SEQ ID NO: 93 - DNA, 1095 bp, Asteriusvirus sp.
  source 1..1095: mol_type = genomic DNA
atgagtgatttttttgattcatttgtcagtactggtacaagtattgtaaatggcgttattgataatataaacattgttcgtgaacctgcttttcagaactataatgctgcacaacgtgtgtttggtacagcaggtgaaatggggttttcattttacaatttacctaaattcaaaaatagttttattatagaatttgtgttaacaccttttgcgaaaaactttattaaaactcaattaccagatacacatactgattttgatgttaataatgtatcatgttttgttaaagatgtaactttaccaagtttttcatttaatattgaaacagtaaaccaatataacaaaaaacgactagttactggtgacattgtttacaaaccaagtaatgtcgttttttatgataccgttgatggtgctggttacttactaatggatgcatatagaaagttttattatggtgatttctttgataaaaatccacagtcatatagaaatgatgttctaagtacacctgaaaactttaatggtttaggtggtaactggggacgttcagtaatgaacaatggaaactacgataatcagtactttttcaaatcaattaacatatatgagattgataatgaaacttatactgtacataacatgataaatgtattcatagaagacgtacaattagaaaccaaatctatggaaagtgaagcagacccttcgttgatatcgttaactatgcgatatgaagcatgtaacaactttggtccagaaggatatttgagcattggtgtaccaactatggaaatagcacaactaataacagacacagaaggtcttggcgttagtgggttttttaagtattttggtgaattagacgacaaaaccaaaggaattttaacaattggtaaaattatccgagcaggtacgtcagttagtgatataataagtagtgctggtgatatattgcgtggtgacattactcctgacacaattcgaaacataggttctgctgtaaccagaggtgctaacgccatagggtttggtagtttggtttctgaagcaagttcaaaattcggattaggtaacattttaggagatttttaa

SEQ ID NO: 94 - DNA, 777 bp, Asteriusvirus sp.
  source 1..777: mol_type = genomic DNA
atggcaaataacatgattaataaatatggcgttcctttaccatcggggcgtaatcgttcaatgctacaaccgaaagcaaaatacaagtttcgtgttattgtgtataatttcggtactgatatagatgaacgtgatcacatcgcattagatgttgataaaattgatagacctactgtaacatttagtactcataaactatatcaatttactactaatacttcctatataggtagtcatgattgggaaccaattactatatctatacgtgattcagttggtaatgcatcagcaaaagcattatcacgccaactacaaaaacaacttgactttcaacgcagaataacttcaagaaatgaccaagattatggttcttataaatttggtttagttatacagatgttgagtggtcgtaactcagatgatacactagaaaatctaggaagagatacactagtagatgctgcaactgctgcaacaaataatgctggcttagtaaatgcagtagatcaatttattggtggttcttcttataacagtgctggtgttatggaatactttgttttaaccggatgtgttattcaaaacatatcatacgattcattagactatagttcaagttctccagttgaaatggtagtgactatcaaaccagataattgtatacaatttgataacattgaagaaatgtatagtaccagaattaattcacttttacctgaaaatgtcaatcaaggtttagatatcattgatcgtgtttttggtagtgtaggattttaa

SEQ ID NO: 95 - DNA, 687 bp, Asteriusvirus sp.
  source 1..687: mol_type = genomic DNA
atggctacaatgcttgatcgatatggcgtaccgctcgctggcggtggtcgtatctctatgaaacaaccaaaagcaaaatacaaatttcgtgttattttctttggttttggtactaatgatgatggtaatatgattacactagacaccaatacagttggggcagtatctgtatcacatgaaaacgtcactgttcatagttacaacagttctgcacactacaaagggaaatacacttgggatacaattgatgttgctttccgtgactcagtaggtaatgcttccgctaaagcactatacaaccaaatgcgtaaagaatttaactactacagtcaagaatctcgcatgacagattcacaatttaaatttgaaatgtggattcaagagcttgatggttctaatagtgaaaatacaacaaacttgtttgaaggaacattgagtacttgggtatgtcaaggttgctttattgaatccagcaactttggtgattgggattattcctcaagtgaagcacaagttatttcaatgactgttcaaccagatggttgtgctaaattgggtccaaatggcgaagcgttcggtgatgaagttagtggtttcggtaatccatcaactgctacctctatttctggtgcacaaactaatattagtagtactactctaccagatagtaacttctacgaaaattaa

SEQ ID NO: 96 - DNA, 126 bp, Asteriusvirus sp.
  source 1..126: mol_type = genomic DNA
atggatatggaagaaatactaaaaagaacaatacaagatgtcagtaaaatagttttaactcagttagaatcaatacacatactaaatatatttttaaaaaatttagaagattgtcggtataattga

SEQ ID NO: 97 - DNA, 2664 bp, Asteriusvirus sp.
  source 1..2664: mol_type = genomic DNA
atggcaggagatctactctcacctggcgtttccatttcagtaactgatgaaagtatgagtaccgctgctgctcctggcactgtaccactatttgtaatcgctactgctgaagacaaacttgtcccaggaagcagtgcaatagctgcgggaactactaaagcaaacgctggaaaactacagcttctaacatcacaaaaaagttcacttgatacctatggtacaccaatttttcaaatgaataacggttctgttgttcaaggtgatgaactaaacgaatatggcctacatgcagtatattcttatctaggcattactaaccgtgcatatgtaattcgtgctgatatcgatctagcacaactagcaccaagtgcagaagcacccactggcccagtatccaatggtactttgtggtttgataccgcacaatcacaagtagaagcgtatgtagcgaagaaagatagtccaagcagtttttatgattggcaacttaagccagtaactattgtaagtgctgaagaagttgaagatgtaagtctagtaggtttaaatgttgatgatttagttctacgttacaaaccaagcaatggtcagatgctaatgtataaacgttctgcttctgggctagtgcaaatggaaacttacctatcaccaattaacaaagttccagttggctcaactgtagaaaaaggtaacatttggattcgtgatggttacacccaaaatggttcaaactattttggtactcgttttgttattaaacgttatgcatccctaactcaagtttggaatattgtaccagcatatactggtaattcattccaagaaattgaagcgaaaagtggtgtactaaacaatagttatatcgcatctcgttttgatgaagatagtaagagtttctctttctatattcaaagtgcaaaactaacaacaattagtgctcctgctttgccacttggtgaaactattattgaacaagcaggtgctgatagttatatgacttttgtttatttgaataaatcagttaaagtactagcagttccacaaggcggtgttattaatacccaaactatcatcaataatctaaatgcaaatgctgaaattattaacgatggttttaaatttaaacgtgaaactaatggtggtttagttgtttccaatacaaaaggttacagtttcaaaatcacacaaagtggtgatgatatttttgctgaatctgaactacaaaaactaactgtagatagtaacaactactctctaattaacgttaataacttccgtgttagttattcagtaccacgtagtgtagcaaaagaaggaactctctggtatgatttcggaaactccgataatctaactgtaactatgtatgttgctgatgttgctaatgatgaatgggatctagtacaagaagaaaacaaatatgtacaagttgatgaaccagcggctgaccgtttaatttgggtttgtcctttgtctcaaggcattgatggttatgatttctatcgtaacgttgatggtgaatgggttaaacttgacagtactgaccaaagtacactaaatggtatgattttccaagactttaatttcccaagccaagttcctgctgcggcattgtatcaaaatggtatgcttgctgttgacctaggtaacactgaaggtgttgttaagaaaatggttaatggtcaatgggaagttgttagtggtgtaagtcttgatggtgctggtctatttggtcgtgctgcacaacgtcaactagtagttgaagcactagctgctgttattattggtaatgatgacattcgttctgaatttattgattttaacctaatttgtgtacctggttacgttgaaacacttgatgaatgtgtaactttaaacactgatcgtaaagaaactgcatttattgttactgacgttccagcacgtttgaatccaaccggaaacggtagtgctgtacaacaatgggctactaatgctaacaatgcaccaagtaacggttcagttggtcgtacaactgcttatgattatgctgctcagtatatgggttggtgtctaagtactaacgttgatggtgaagaggttgcagttcctggtagtactattgcaatgcgtacatatgcatatagcgatagtgttagttatgtatggtatccacctgctggtacaactcgtggtgttgtaacaaacgctgcaagtactggttttatcaacagcgaaggtgaatatcaaccagtagtatataaccaaggtcaacgtgacgttatgtatactaacaacattaacccaattgcaatgcgtcctaaccgtggtttgcttgtttatggagataaaactctatctgctaatcaaacttctgcactaagtcgtgttaacgttgctcgtttagttgtttatattcgtcgtcaactagaaattatttccgaaccattcctattccgtttgaatactccaagtactcgtcaggaatttagtggtgtagttaatagtttcttggctgaaattgttcaacaacagggtctttataactttgcagtagtttgtgatgaaagtaacaataccgcagagcgtattgaccgtaatgaactttggatggatattgcaatccaaccaactaagagtattaacttcatttacgtaccaatccgtatcgaaaaaactcaataa

SEQ ID NO: 98 - DNA, 627 bp, Asteriusvirus sp.
  source 1..627: mol_type = genomic DNA
atgggaagacaaataattgcaattaacggaactattggaagtggtaaagatacatttggtgaatcttttattaataatggttacacacgaatgtcattcgcaaccaatctaaaagattcagttgctgctatctttggatgggaccgtgaaatgcttgaggggtcaactaaggaaagtcgtaagattcgtgaagaaccggatcagtactggtgtgataagttaggtcgtaatgatgtatcccctcgatgggtattgcagaattatggtactaatattttgcgtaagtattttcataatgatatttgggtattcagtttagaaaaatcaatgcaagacatagatggaaatatcatcatcactgattgccgttttccaaatgaattaaaaatgattagatcgaataatgggactattattgaagttcaacgtgttctaccacattggtatggtttggctgcctcttataataaaggggatattaatattaaaccagttgaacttgaatcagtacacgaatctgagtgggcttggattggaataaacaatcctgatataattgtacagaataacagtactattgatgatttacataaaaaagcaatggacattatttattctaatacataa

SEQ ID NO: 99 - DNA, 270 bp, Asteriusvirus sp.
  source 1..270: mol_type = genomic DNA
atgaataataacataaatgtaacgtataacagatatcgttgtggtagaccaacgcttgattatgaatcaactgaaaagtactggaaatttatcaaagattcaatcattgatgttatcggtagagatcgaataaatgcatgggcgagtatatatcgtgatgatgatggggaaacattttttattacttatgtttctatatattatggtaatgagtcaattcttggattacttgaaagtttagtaggaaaggatttaatagaaattatataa

SEQ ID NO: 100 - DNA, 792 bp, Asteriusvirus sp.
  source 1..792: mol_type = genomic DNA
atgtcttacgattatatgggtggaaaccctgatgctcctaactttgaccatcgtgaaaaactgaaagatgttatcactcaaatgttgggtgctggggccgttgaggtagaaattactgatggtcaattagaaattgcaattgataatgcggtatcgaattacagagcgtggagttctgcttctaaagaagaagcatttttaaatatgaaattttatgattcacaatctgtatatatgctaccaactgaagttgaaattgttaaaaagatttatcgttatggtaatggttacttaagttctggtagtgggaactcagtagacccgttctctctagcattcaccaacacttacttattgacttcagcacgaaatgctggtggatatgatctaactacatatgattttagttttcagttccaagaactggtaggtcgtatgtttggtcgtgatattatatttcaatttaacccaatgaccaaaaaattaattatagatcgtgatattcgtggtactgaagaagtactattacacgtctatcataatattcctgaaccattgttgttccaaaggcagcaaagttatccttggttgcgtgattgggctttatccgaagcaatgattatgttgggtcgtaaccgtgctaaatttgcatcgcttcctggaccacagggaacgttttctatggatggtgataccttacgcaatgaaggtttacagcttcaagaacagcttaaagagcgtttgaaacgttatcaagatggtgctgaaccactcggtatgattattggttaa

SEQ ID NO: 101 - DNA, 120 bp, Asteriusvirus sp.
  source 1..120: mol_type = genomic DNA
atgtacagagataaatcacgagatctatatggaatatatgttactcagttaatatatataatagattccgaacattttactccattggtatacctgtactgcttgtataattcaaaataa

SEQ ID NO: 102 - DNA, 378 bp, Asteriusvirus sp.
  source 1..378: mol_type = genomic DNA
atggctgctaatgacgttaaagtaaaaactatccaagctatcgtagtactgaaagattctacaccatcccctaaagaattagtaatggctgggatgactatgttacatcaatacaaccctgaatcacctaactatgttcaagaatacgaagctaagaagtttaaagaacattggcagtcatggattaaagataatgaaatggagcaggtagtatatgctgctgatgacattttcgaactggaacaaattgaatatctagctggtcaacaatcagtaccattgagcattttcggtaatggtgaagaagttctggtattggggccattcactgctgatgatatcattcacttactgagtaattgtaagaaaattgaataa

SEQ ID NO: 103 - DNA, 309 bp, Asteriusvirus sp.
  source 1..309: mol_type = genomic DNA
atgactatgaccgttaaactactaaacatcaataacattggcccagtactagcagttcttcaaaccgattctgctgaagctgttgtagttaactacccagcacaactagggactgacgaaaatggtgaaatcattcttcgtgattatctagagtttgttagtatggagaaaaatgttattttttataaatccaacattattagtgttagtgatgcaaaccctgcattagttgatgcttatgttgatgctattaaagcaatcgaaaacactccaaaagttttcgttcctgagaataaaatcattctataa

SEQ ID NO: 104 - DNA, 477 bp, Asteriusvirus sp.
  source 1..477: mol_type = genomic DNA
atgattcatgaacaccgaggtaatctgtttgaattattcagtactgttaccgatgatcaaaatgcattacatattattgctcacggatgtaatgctcaaggtaagatgggttctggtttcgcaaaggaactaaggaatcgctacccaatggcatatgatgattataaagcatatgaaaaggaaatgggatttcttagaattggacaaattgcatattcagcaattaacgataatttgattattgcaaactgtattacccaaaaaatgtacggtaatgacggtgctaaatatgtcagttatgatgcaattgacgatgtgttcaaacatctaaattatttttgtaaagttgatcgagatgttcatgtacatttcccgaaaattggagccgatttgggcggcggtaactggaacgttatcaaagaaatcattgatcaccgtctggtcaatgcagaaaaacacttatacattctaaaataa

SEQ ID NO: 105 - DNA, 243 bp, Asteriusvirus sp.
  source 1..243: mol_type = genomic DNA
atgctcagttttcgtgaacaattagcaaaaggtcaatttcaggctaaagctcaaactaatattcctaaaaaatctgcatttttaggaacaattacggaagatggattttgtgattatgatgcaccagaagattcatggtacattacaaaagacacaaaacgcagtaatagacttcacaaaagtacaatagctagaaagcatcgaaaagaattaaagaaaatccgtttcggtgaagaagaataa

SEQ ID NO: 106 - DNA, 243 bp, Asteriusvirus sp.
  source 1..243: mol_type = genomic DNA
atggatattgaaaaagtatcatctcgtgcaaaacaactagctgatacgttgggagtagagttcaaaattcctgatatttcaatagctaaagaaaaagcccagattaaaattaacaaaatgaaagaatatctatctaaacaagaacagtatgattcggctgtcgaatttattgtaaaatcttttagtaaagatgatattttggcatttatcaaatatgtgaaggtttctggcaaccctaaataa

SEQ ID NO: 107 - DNA, 249 bp, Asteriusvirus sp.
  source 1..249: mol_type = genomic DNA
atgaaagttaaaatttatggtcgcaagactggttgtaaattttgcgacactgcaaaagctgtatgtgaacaaaataaatttgaaatggagtttgtagatattgttgctgaaggtatcgatggttcaaaactgtctgaaatttgtggtgaaccagttcgtcaagttcctcaaattttcgtaaatgacatttatgtaccaggtggttgtactggatttattgaaggtcttaaagaaggtcgttggaactaa

SEQ ID NO: 108 - DNA, 399 bp, Asteriusvirus sp.
  source 1..399: mol_type = genomic DNA
atggtcagatacttatcggacatacaacacggacagaatcattgggatttacctaaagggaaagctgagggtaatgaaactttcaaagaagctgctgtacgtgaatgtttcgaagagacaggatacgaaatcgatgaagatgatcttctgtttcttggtgatgtatcctatagaaagggaaaaaggttagtacttttcttttatactgccaaagacaaaccaataccagatgaattagtttgtaaaagtacttacactaatagatatggtaagagtcatccagaattggataagttcatgtacattgatgtacgagaatgtcaaaagtatttgactgaacgaatgtgtaacagtattattaaagctgttaaagcttttcaaagaaatagaaggaaataa

SEQ ID NO: 109 - DNA, 1113 bp, Asteriusvirus sp.
  source 1..1113: mol_type = genomic DNA
atgaaaaagtatttggttggcggttacgtccgtgaccgtttaatgggcatccgtgcaaaagacaaagattatgtcattgttggtgcatccgaatctgatcttaagtacttgcaaagtattggctataagcaagtaggtaaggatttcccagtatatctaagtccagaaggtaatgaacacgcattagcccgtactgagcgtaaaactggtactggatatggtggctttgaagtggatacaaaaggcgtaacactagaacaagatttgtatcgccgtgaccttacaattaatgcaattgcgtatgatccagtactacaaattcacatcgatccatacggtggtaaagctgatatcaagaacaagatactacgtcatgtttctgaccattttaaagaagatccattacgcgtgttacgtcttgctcgatttgctactcgttattcagactttactatccatgaaagcactgaggaactcgctattggaatggtcaatagtggtgaactaaatcatcttgttcctgaccgtgtttttgtggaattcgaaaaagcattttccgaagaaaagcctgcaaagttccttaagacgctaagtaaatttggttattacgaaaaggtgtttaatacatctttgaccaaaaagaatttagaccttattgattatatttcagataactgtactgatgtatataaaccatattttctgtggtctattcttcttgaaaatgaagaagtaaataatgattcagtacttaacggtgctattaaagttccagttaagtatgttaaatttagtaattatatcaaacgtttccgtgatgatatcaaaacattccgtaaaaagaccccaattgaaatgggtaatattttattggatatgaatattaaaaataacggaggtgaagaattcctttataaagttttggaatacttcattttgcgaaaagaaattgatttagaacttgaagatctaattattaaagtttatgatcgttatactgatgttgaattgccagatattcagcaaatggttaaagatggtgaacttgaaacgtcagaaattcgtgattttgtttgtgaacttcgttacgaagcaatcaaacaaatgttctaa

SEQ ID NO: 110 - DNA, 123 bp, Asteriusvirus sp.
  source 1..123: mol_type = genomic DNA
atgattgctatgttagaagaagattggggtgtttccgagcaaggcacagatgaatatgaatacccagaataccaaccaaaaggcttctgggaacgtctacgtgattggttgatgggggaataa

SEQ ID NO: 111 - DNA, 375 bp, Asteriusvirus sp.
  source 1..375: mol_type = genomic DNA
ttggacgttactaaaattccaaaatttaatgaaacgttaaagtactttgctgaacacgaaatcagtactgaaagacgtggtttgatttcatacaatcatcatcgtgttatgtacactaataatttccagggtacagttcgtattaaatttcgtaatgcactcgacgacaatgatgaattgttaattttactacgaaaaagtaagatagaattgacatacgcaactcaccatattgaaagtgagttgatgtggcacacactatcaaaaaagaagggacattaccagttgatgataatggaccagaaacacttgatcagtacatgttcattgatgatacatttggtattgactattctgcatatcagtgtatactag

SEQ ID NO: 112 - DNA, 411 bp, Asteriusvirus sp.
  source 1..411: mol_type = genomic DNA
atgaaaaagtttgatattaaacctattattgatgctatcgaaattaaattaaaaaatactaaaaagccagatagtacaggtttgttctttagtttagataaaatgtattatgaaacacacgtgtcaagttatgatagaacaggaaatctcttcatccgtacatataacatattttatagtgaagatgtttttatgatagatataaatctggatgaaggtatagtgttgatgtatattgaggatgttcaatccacagaacaacgaaacgggactcttcctattgctgctacagaggaagagtttttgcaatatcagttcattgaggatacctttggtattgactttgatacatatcagagtataatgagggtatacgaactttatgaggattatgtgattggacgttactaa

SEQ ID NO: 113 - DNA, 186 bp, Asteriusvirus sp.
  source 1..186: mol_type = genomic DNA
atggaatatacaatatgtatagttatatgtatcatatccttactagtcggggttggtgtgatgatttattgtgatgcagaacccagtactgaagtaggaacaacaataacacttaaacctggtgttaaagttaatgataattattgctatgatccaaacactaatcgatatgagatttgtctatga

SEQ ID NO: 114 - DNA, 396 bp, Asteriusvirus sp.
  source 1..396: mol_type = genomic DNA
atgaattattcctggatggaaattgtaaaatctataatatcaacacatgatatggacttacctgaacacctagttattaatagatggtactatccatatccagataaccgttgtgttgggattggattttttattaatgaaaaatctcaatatattggattaattgaagattatacaaaaaccaacattgcgttctctattgagttgaatgtagatcacataaaatactacactaataaaatggacgaagatgatggtgatgttataattccagcagaaatagacgaagcttcattttttcagttatcattaattcatgatgtatctgatattacttatgataatgtgaaagacctttttatattgtacaataaactgtataattactttttataa

SEQ ID NO: 115 - DNA, 333 bp, Asteriusvirus sp.
  source 1..333: mol_type = genomic DNA
atgctaaaattaaatattcaaggtaatgttgattttactacagcaattcaagatgcaatttacgatggtgctaaatgtcttgaaaagttccgtacttcaactgtaatggatattgaagttcatgtgaagaaagagcataagtctcaatactctgtgactctaacatcaggtagtaaatcagttactgccgatgcagcagatttatacaaagcaattggtgattcatttgaaaaaatggaaactgtattcagtaaagacaaaagcattaaattacaccgccgaaaccatccagaacacccagttcttgatgatttgacagaaaacgaagagtaa

SEQ ID NO: 116 - DNA, 927 bp, Asteriusvirus sp.
  source 1..927: mol_type = genomic DNA
ttgaaacaagcgaaaaaagcactgaaaactaagactacttatggtgttctagtttgcacagtacttgtcgctgcgattggattttatggtttttctcaaaatgatcgtgtatcatcatcggacgaaagtcaggtacacaatttaaaaccacaagttacgcaaattcaaaagcaggaattaccaaaggtagaaatatcaaaggatgttccacgcggcgagaagcattatacggttcaacctggtgatagttattattctattgctaaaaagtttaaacctaaaaatgtacaacttgaagagtatgttattttgttgaaaaatatcaatttaaatgctactcttcatacttctcagggtatctttatcccaacaaaagaggatttgaagaacgtattgttaccagatgtgactgtacagtttgattataatgatccagaaattgtcaatcacatcaaagaagctgaaggttcaattgaatttcagtccaagaacaaacgccgtttacttggtgggaaagtcggagttcctttccacaattctaaatttcatccttacaaggatatgaaaggtaattatacaatcggttatgggcattatttgggaagaaaagaatctgatgctatcaagtacagaaacggtattaccaaagctcaagccaacaaacttttaatgcaagatatgaaaagaacatatgatgactttttattattgatgcagaaaaaacaagcagtaaatctgaccaaagaacaacaacgtattctttttgaaatgtgctatacaatgggagtagataagttagcttcgtttaataaactttggaacagtgtaaaaaatgataaccctaagaaatttaaaaaagaaataatgaattccttatggtatcgtcaagttacaaaccgagcagatttgttgttaagttcactctaa

SEQ ID NO: 117 - DNA, 138 bp, Asteriusvirus sp.
  source 1..138: mol_type = genomic DNA
ttgaaaagaacgtttttgtactgtagaaagtccgatgaggcttttgcaaatggcctctttgccatctttgtgattgcccatcttaacaatcaacaaaggaggcgttttgaaacaagcgaaaaaagcactgaaaactaa

SEQ ID NO: 118 - DNA, 411 bp, Asteriusvirus sp.
  source 1..411: mol_type = genomic DNA
atgattgaaatggaaggaactctggtgtatgatccagaccgtggcactatgaaaaagaagaaggacttctggttagtactgcaacttccattacagttggttagatactaccagtacttcatcagaactgatttacatattgacgttaaagatcctcaatggggagcacatgttagtatagtgcgtggtgaagtaccaccacatgaagagttctggaaaaaatacgatggaatgaaagtaaagataaagttcaatccttgtattgagatagtaaaagataaaaagaatccaggttcattctttatcattgaatttgaagatgatttcatcacacacattagaaacgaactaggactaccaaccaagtactttaaatatcacataactgtaggtagaacctactacgattaa

SEQ ID NO: 119 - DNA, 204 bp, Asteriusvirus sp.
  source 1..204: mol_type = genomic DNA
atgattgaaattaatgctgatatctattgtagtgcagcaccaaattacttcatttatgcactaagtacatttggtgaaactgaaggtgaaacttttgttttagtagagaatactacatggttcaaaacaagtaataaaattccgaaagatgttttggaaacatatgttcgtattgaaaataaaaacatatatgtaattttatag

SEQ ID NO: 120 - DNA, 132 bp, Asteriusvirus sp.
  source 1..132: mol_type = genomic DNA
atgaatggactaaagaaatttggtaaagattttctaaaatgtatacgctatacatatgatgcaaacccagaaatgactgctattgtgggtgtgtttattacactcgttgtattaagctttattgtggtgtaa

SEQ ID NO: 121 - DNA, 345 bp, Asteriusvirus sp.
  source 1..345: mol_type = genomic DNA
atgaaatacatcgataaaggtacagtggagacacagtactggaatatccatattgctggtgatattcaaacagcaagagagtacacaagaaagtttgcgtttaagcatggcttttgtgtacaattaattccctgtgaatatatctacactggcggtcttgaaagtgggatgtgtgctcgtattattcagtacccacgctttccaaaagaagaagtatatctcaaccgagatgtattaaactatgcaaagggtttagctgaagagttgtgtcaaaagagctttactatagagcgaaataatgatacaatttattatgaaagtgatgaacctttacacaagaaataa

SEQ ID NO: 122 - DNA, 390 bp, Asteriusvirus sp.
  source 1..390: mol_type = genomic DNA
atgagatggaagaaacgtcacattaagcgttttgagaaaataattaaaaaatattactcacataagttagatccgatgattcttcagctaaggaccagtatttttgatagacgttatccgcagtgtttagaatcgtacagtcgtaagcgttccaagaatgaataccaggtgtatcgttatgatttatctgaattgtttttgaatactcgtgtatcagtaccaatcaagctgtactcaagggtaaaacgaagtagggttcaagatattacatatggatatcttatgattgaaatcgacgacctcaatgaaaaaactggcagaaattacagtactttatgtctggaaaatcatgattcaataaaaagaatcatagaagagttgggaaagtaa

SEQ ID NO: 123 - DNA, 453 bp, Asteriusvirus sp.
  source 1..453: mol_type = genomic DNA
atgcttatagaaacagaaacatttaagcgttttattgacgtatgtcgtgatacgtgtttttgttatctttcatcacaagaacagttcgatgcaatgagtgatgtgttaggatatcgccgttcggtattgatgaattttgatggtcctttgattgaagttcatgatgatgtgtattccctacaatatgtatcaattaacaatgcgttcatttttattgctgactcgtactcaattgtagttgaggaacgtggtaaaggtataccaacaacacactatattgattgtcaaagaactgattgtgtttatagttctggactaatacaaacaccaattccatatcctagcatttatataaacacactccatcaagaaattattgagtactgtaatagtatttctgatatagatacacagtattttcctattgtattattgaaaggagttagaacatga

SEQ ID NO: 124 - DNA, 225 bp, Asteriusvirus sp.
  source 1..225: mol_type = genomic DNA
atggttgattcatttatgaaaaaaatctttaaaaatttactatctggatttgaaaaagcagtccgtcttattttcagttcagttgtaatggttattacagtactggcattttctctagtactgcattttgtaccattctggctaatctttattgtacttattgctctgctaggtgcacatgtttattatgtttaccgtgacgcattggatgatgataacgattaa

SEQ ID NO: 125 - DNA, 339 bp, Asteriusvirus sp.
  source 1..339: mol_type = genomic DNA
atggctcttagaggttcaaatcaatataaatgtattgcagagatcaggaagaaagatggaacacttgtagaccgaacattaaaggaagaatataaagaactacgtgatgtggtgcataatgatagttatggcgggatgcgtcgtcaaaaaatttatgaatatctaaagaaaggtttagaaattcaggttaatggtcttcattgtattcaaacaaaaaatgatcctgatattctacgtttgttgaaagaagataagattgaaatgtttaatgttcctatttcattctatggtaataaactaaaatgtaagcatactttcttgaggattaaaaatggttga

SEQ ID NO: 126 - DNA, 480 bp, Asteriusvirus sp.
  source 1..480: mol_type = genomic DNA
atgtataatcttataattatccgcgaaccatatgaatctgacaacagttcaactgatggtgaggttttagtatatcaaagttatgaacaaagtggtattgaacatgaattaaaagattatttacgtcaacatatatatctatatcgtacagaaccacgtgaacagtatggagatataatgtttatcgtaactcataatggtgcagtaattgaacatgtaaatatgacaaataacatgtattttcataattacactgacacgtctaaagaattaggaaacgatttcaatgctgtttacaatgcattgcgtatcaattttttaaaaaatgacaaattctgtactgatattagattagaagaagcaaatacaaaaaagaaactttctcgaaaatacgagagtgatagaaaaaaagaacaagagattcagcgtttacacgaattgatgaaaaaataccctaatgaggtacaacatggctcttag

SEQ ID NO: 127 - DNA, 282 bp, Asteriusvirus sp.
  source 1..282: mol_type = genomic DNA
atgaaaattgttgcaagtgcatggatgaaactaccagatggtacaactgcttttgaagaatatggctttgttgaaagtgtcgatgaattaaagcgtttcaaaagtgaaaatgatgatgatgtgtttgatattgtatttgtatatcatcatattcctaatgatactgattatgaacattattattatcatcctgagttgttggaaacacttgtatgcgacaactatcatgaaattgatgaaaatacagctttactaatgttgagtaccgtatctccggtataa

SEQ ID NO: 128 - DNA, 555 bp, Asteriusvirus sp.
  source 1..555: mol_type = genomic DNA
atgcagaatcctgaaatggaagtgtatcatgagcacatgcacattgatgacatgtgtgacgcttactattcaccagaaaatgtgtctggtattgaaatcacccctagtggagtattcatcagtactgaacgtattgatttcaattcccagcaagaaatcaaaactccacataataaacctcgcattggtgctattgacctagtatttcatcaggaccgtttggtggaatatgatgaagacgatggtactacccgaactgatgttgagaatgttgtttttcgtttttataatgcatacgaagacccaactactggagaagatttcttccgtgagctattagaggatggggaagtttatggtcaggatggtacggtttttgtactagaccctaactatgagccagatcacaatacatggcaattctatacaccagaagatgtaatggaagttaaagtacttatggatattgacgataaatggaatcctatgtatacttcaatgacatatgaagaagccaaagaatacttcgtttctaaactaaacattacaaaataa

SEQ ID NO: 129 - DNA, 393 bp, Asteriusvirus sp.
  source 1..393: mol_type = genomic DNA
atgcaaatcaaaaagattaaattccaccagcattgttctatacatgaatgtgatgattgtggtatacaaatgagtgacatttatacagtttcctgtaaaggtttcaaattcactcacggtgaatctgcttattgttatggtacagaagaaggtgatatcgaagtagtactgaaagaattgttccagtacttgcaaagtgtcggtcatgatgttacaatacccacatattatgaagatgattatgatgcacatgtagaagaaaatacatattataatcaattcgtttatggtaatggttttatcacatacctacatgagaatggtattgaggtaaaaactaagtacaccagtgatgattatgatgatgataattctatggagattgaagattga

SEQ ID NO: 130 - DNA, 432 bp, Asteriusvirus sp.
  source 1..432: mol_type = genomic DNA
gtgcaaattttctttaaggatggtactattactccaaaattggagggttcacatattcaaactgttcttagcttagaatatgggttggtatttaacattccttatgaaaagccaattgttttattaggtaaaaatcaatcaacacaattctctaatcaacatgctgtttgttatacatctgatgatattgatttcatttcagtactgacagaatatgatcctaatacttggcatgaaacatgggaaaatatgtcatatgatgaagcaattgaatgtggtaaaaatttagccaaaatgttatttccaccgaaaaaagaactttcacaagaacaaaatgaatcattttctaaagattttcctgattctgaattcaatgttaaagcatcaactaccaaaattggtgaatttctaaatgcaaatcaaaaagattaa

SEQ ID NO: 131 - DNA, 114 bp, Asteriusvirus sp.
  source 1..114: mol_type = genomic DNA
atgacccaagagggggtttcgtatggtgtaagtacattttcagaaactgatgtaggttttaccgttgtgaaaataccagatggtgtaaccattaatttattatcaaaattctga

SEQ ID NO: 132 - DNA, 441 bp, Asteriusvirus sp.
  source 1..441: mol_type = genomic DNA
atggaagatattaatgatttacgacacgtaatggactttatcggaagtactgaagaagataattcatatgatgaagtactattaacttttattgaaaatagtttgtttttaagttctgctgcacataactggcacttacaatgtcatttttatacaaagcatttacaattagatgaactatataaagaattaccagaatatgtagacgcatttgttgaaggtatcatgaataatcgtggtgctttgcaagttgggactggtaatagttatcgttttacaccaattgaagattgtgtaccaattcttgaagaatatgttgagcaatgcagagcaattcatgatatgcttgaagaatcgggtgattacggcagtgtaaacacattagaagatattatgagttttgttgaaggaacactttacaaacttaaagttttacaataa

SEQ ID NO: 133 - DNA, 429 bp, Asteriusvirus sp.
  source 1..429: mol_type = genomic DNA
atgagtaacacaacgaaaatatccgataaatctgaattaacacaaatgttattcaaagaatattttgagttccagataaaagacgaacatcaattaccacagcaatatttgaaaagaattaaagatccgtcagtaattactaaagaaactaatttttataatagtattttagatttcgttaaatcagtttatacaacaagacctattgtagttttgttttttgataaatctattcctttagtagttcctgaaaatgtattttttatctcagaaactgatttaaataatcaaagtactgtaagtagattaagaaattgcttacttgtagtatgtgattcttctttgtataataatagaatactatgggatagaagtaaacgcaatgcagtttcggaaatgaatcctgaaattacctttattattaactaa

SEQ ID NO: 134 - DNA, 216 bp, Asteriusvirus sp.
  source 1..216: mol_type = genomic DNA
ttggtacaagaaagatccgtccaaaatttgagaaattcgcaattcgataatatccgatgccatcatcgtcaagagagacttaattgtctcttttttattaccttcattcccctgcggggggatgtaatagtcctcaacaaatcccgtcaagtttttaaagtacattatcattttcagaaggaactagtttacgaagtaaacgcagtgacttcttga

SEQ ID NO: 135 - DNA, 165 bp, Asteriusvirus sp.
  source 1..165: mol_type = genomic DNA
atgtataaggttcgcaccttaccagatttgctaagggagtttaagaatagcggacgcaattttacaagaaagttgcgtccaaaatttgagaacaggtactactttgatcgaatagagttagtactgagtgctgttgatgaaaagaccagcgaccgttgcatatga

SEQ ID NO: 136 - DNA, 117 bp, Asteriusvirus sp.
  source 1..117: mol_type = genomic DNA
atgagctttaccgttgtagcgaacagcagaagaaacccgttagagtactggcattcaaacaaacacgatttaagaccacgaatcacggcgacacggctgtataaagaactccgataa

SEQ ID NO: 137 - DNA, 477 bp, Asteriusvirus sp.
  source 1..477: mol_type = genomic DNA
atggtgttaagtgcaatgaagtttctgttaccagagaagaaattatcacttatcgaactttgtggaaatatttgtaaaatgcttaaagaattagatttttcaaacttagaaattatcagtgctgtaaaaaacatttccgatatgggagatgagaaagcagttcttgttactattacttttgtaaaagaaaaagatagctatagccatttaactggcattgaagaactaattcataaaaccaatcttgagaatgatggtaaactcatcaagcttcaggcttcctatacgcaaaaaacgtcaaattttatagacctaaataatgtagtcaaggtggtgtacaatcatcctgaccacaaatataggaatacgacacgaaacgaaaatgttgcaaaagattcaaacattattgaagatgttgagtttataaacacagtttttgatcgttgttctaaggatttgaaaaaagtatacatgtaa

SEQ ID NO: 138 - DNA, 357 bp, Asteriusvirus sp.
  source 1..357: mol_type = genomic DNA
atgaaatctaaaatctttttaccacaattaatgtggcatctagcagagttagatgaaaatgatgaatatactgactatggtgcatgggatgacagtactgaaacttttaaaccagatgtaaaatataaaatcatctgcaatgaaagcaaaggacacagaaggtggactgaagaatttgatctcgtatttcttgacatgagcacaaataagttttatcattgtacttatgaacgaggtttaacagaagatagaccagtacaaccattcagtactgaaactgatggtgttaagtgcaatgaagtttctgttaccagagaagaaattatcacttatcgaactttgtggaaatatttgtaa

SEQ ID NO: 139 - DNA, 612 bp, Asteriusvirus sp.
  source 1..612: mol_type = genomic DNA
atgaacaaatatcatgtttactatacgactaaattatcacttcttgaagaattaaatcaacgaagtactaagatgaaacgctacactttaaatggtattacttttcgatatttcccacaaaaagttcttacatttattaagaatacaaaatgcgtggcatgtgggattgaagctactgaagtacgcattgaacgttcattatgttctgatccagtatatggtaaaccacatttaaatgtatatgctgtatgtggtctttatgaagttttaatgacagttgaccataatcatctggcatctaagggtggacctgatttagagtcaaactttaatactatgtgctccagatgtaatcaactacgttcgaataaaactgaaacagttgatgagtttcttgagaaagttaaaggtcgtaatcttctccaagaaaatatgaataatttctttaatgtacaaaaaaagaaaaataacattgacaagtcgaaactactagaagaacgtaggttacgtcaagaattatgggaaactgatcatctatggcatgttcgagagtttggtcgtcatatgaaagctttgaaaaaagaacagaagaaattgaataaacatgattga

SEQ ID NO: 140 - DNA, 309 bp, Asteriusvirus sp.
  source 1..309: mol_type = genomic DNA
atgaaaaaattattagttccaatgatttcttttttaattataagtgggtgtgccgagcaagtaaaactacaatcccccgcaccaattaaacaagaaattctgttagaaagatgtgatgatgatacacctctaccacaaaaaattatgattgacaaaaatggttttaaaggttatgatggtgcagaaattcttaaagtacttactcgttgggatgcagtatacaatgaatgtgctttaaaacatgacgcattgattaaaactattcgtgatttacaaggtaaagatattaaaatcaatatcaaggaataa

SEQ ID NO: 141 - DNA, 375 bp, Asteriusvirus sp.
  source 1..375: mol_type = genomic DNA
atgagtatgttagaaataattgtttcaaaaattcttattccattttggaaaccaatttcttttgtattattaattggcggttcagcttatgctggttgggaagctaatacttattacagtggatatcaacaaagcatagagcaacaaatagctaaaaaagttgataccgccttggataaaatgcaacaagaaaatgcaaaaaattaccttgaaactaaaaaaatcatggaagataatgctaaagttattgaaacaaaggttccttttattgtagaacgtgaagtttataagaatgtatgtttagatgaagatggtgtaaaagtactgaatgaactaaaacaaaattctcaagcagcgaggaataaattcaaatga

SEQ ID NO: 142 - DNA, 420 bp, Asteriusvirus sp.
  source 1..420: mol_type = genomic DNA
atgttaaatgaacgtattaaaaatgcactacatgtattgaaccaagaagtcaattctattcataaaagtactgaccgttataaagtaatgcatgaaatcaaacaagaattggaatctattaataagggagagtggtggtatcttcagcccgaatatcaaactcgtgaattaaacgatgttgaaaaagaaattgtcaaattcatcactactcgttattgtgatacatcagagaatgatgtatcagcgaacttcaatcttactaaattggaagtcgaagaaaaattccattttgattggcttgattggattgaaatggtaatggaactagaagaaaaattcaatgttgaagttgatgaaaagttcgagaataatgaaactaagctgtatgaactagtagaacatattcaaaaaatgttgtaa

SEQ ID NO: 143 - DNA, 2790 bp, Asteriusvirus sp.
  source 1..2790: mol_type = genomic DNA
atgaaaaataataatattgataatattatacaacttctttatggtcatcataaatttattgagagaaatactggagacaccatagatccaacagtacaacattatgttgttaacaaccaaggtgtactagcaaacaaccgtcattttataaactactctgcaatggaaggtcaaccaaatggtgacggaacaacagaagggcaaagtctattaattttaggatacatttatgcttatatggctactaatgatccaatgtttttagagaaagctaaatggtactgggacgcatatcatcagtacttttatgctggacgtgaattaccagacccaccaactccacttcaatgtaactggatagttaatgccaaagaaccgattttggctaactggcctttagctgatgatggatggcctacacatggtggtttcaagggtgtagaatttacatttacaaatggacaatgtaaaataccacatggtgcaccttattatggtcagttcttggataaagtaacattcgcattcaaaggtgctttagcatggaaccaaataaatgcgtcagtaaaagcattactaccagatggtagtgttgattgggatacccctggtgatcaatatgatgttgactggattattgatttcatgggtagaaaaatcgactgggatggtaatattttagcagaaggttttgacgaatctgaaaaaggaacggttcaattaaaaaatacaacaattaatggtgtatataaattaaattttgctaatcgtcaaccagtagaatatggtggtgtgataattcaacgaaatgaaatgcaacacaaccgaccacttcatgttccaattgatttggaatttgcggataatgcatcagatgcagaattgtggtttagtgatgcttcttatttgttatataaaataacaaaagaaagaaaacattatttgggttggaaatgttcattactcacatgctatgcttatggtgatatcgactccagagataaatttttcagacaaagtacaattgtaaccacaccattcactgatggtatttcctatgaatatttttatccaagtgatgctatcgctaagtttggtagaaattctctaggatatattactatcaggcaagaccaaagtgcacaaagtacaatggaacaacaagctatttggttcagggtcaatgctgattctaaattacttgtagattatggtggtgtatgtgatgatggtaagccgttatcatttaaaccagtactggaattgtcaaaaacaaaaaatgaccatgatgttgttcgttatcgttgtggcttaccagaaagtaaagaccaaaatatcacacattcattaacacctttaagtgcatttgttagagaaaagaaagcagatggttccccttatataattgctgatagtagaatagttgttccttatggtgcagctacgtccgaaatgatatatagtactgatatattagttacacgccgagataccattaatcagttagtttgtggtgaagatgatggtgctgttattggattttggctattagcaacaaataagtctgaagttaaatcttttacatatcgttcatatgaagatgattacaatataagaattgtagatgataatggttggagatggtggtggatgattcctgcaacacacggggaatggactacaatcacactaagttccgatacattacgtttatctgggtatcagccaaatcatccaagttctgacccaagaccagatgcaccagtatatagtgagctagaagatattactattttacctgatacaaccccagtagatggtgttgctgcaataattgattggtattgtattaatgacattccagaattatatacggatgctgacggtgatgactatactatgacattttcaataacaattgcaggtgaatcaccatatactgcacagttaggggattgtgtaatcaaagattatttgttaaactcattacattacacaccaggaacaataccattttctaacatcactgacccgtatgcgaaccagtactcaggttggcgtggtttaccgtatccaggttatcaatatccagtgatatattgttttaaagaccagccagtagataacacacgcttaggaaacatgttaagctttatgaaagattcccaaacatggtttactcaacaattcggtactgttggtccgtgtgcacaagcatatgtttggaaccgctgggataacttaaaatatggtgaaccagatacatttactatgctacattggggtgatcaagcatggagtgggtatgaaccacgtgcgttctttggggctgccagagcatggcaagaactcgcagagagaggaattgaaccaccagcagatcttgttgaattttgtgagaattggattcactttttaattcaatttcaaaaagataatgatggtcgttcaccaacaatcttcaataaagatggcacagttgaaggtccagattgggactttacaggtcatatgtgtgggttgtggttagctggggcttgtgctgctggattggctggatgtaaaatagaaggtctaacaacactcgctgataacttagttctcgaacttcaaaagaattatgttattgtaaatccaggttcaccaatgaatggttcatggagtccagcagttagagaaggtactgataatggtatgttttttggtttctgggcaggtgagattatgcgtggattgggattatactcaatgtaccgcttaaacacaccaaatcgtttccgtgatttataa

SEQ ID NO: 144 - DNA, 537 bp, Asteriusvirus sp.
  source 1..537: mol_type = genomic DNA
atgatggttttaacattgtcagtactcggatctattgacggtgaagatagttctcttagtgattcggtaattgcatcatttggaacaaataaaaacagttcttttattatttctggctggactggaatgacttcttccgaaaataatgtaaaaataaaagctaaagctactaatgagaatcatgaaacagaatgggtaacattgtatgatagtgctagtactaaactatataatgtactaagttcaaacaatattttacttaaccctttatctggtaattcagtttttaatatcaacttaactgatagaactactactattggtattggtgctgcaccaagtgaagtttattctattacagtactattgactcagcaaactggttcgaatttagttaattggggttctaatatcaaatggtcatataatagacctgtggttctatcgtatgaaatgggtgaaaaagatattatttcgttagaaacctatgataaaggtgttacatggtatggtgcattaattagagcaggagtataa

SEQ ID NO: 145 - DNA, 201 bp, Asteriusvirus sp.
  source 1..201: mol_type = genomic DNA
atgagtataatggtactaaaaatgccattatactcgataaatactcaatataaattaacgcaaggattaagtatggcacaacaaattttcacagatatccacactaccggagttattaaatttcaaaataatttttcaggtgcaactggcgtagacattaaaaatgatggttttaacattgtcagtactcggatctattga

SEQ ID NO: 146 - DNA, 2271 bp, Asteriusvirus sp.
  source 1..2271: mol_type = genomic DNA
atgaataaccaatatattgaacaaacaatagtgaaacacttggctgggtcacaagcctacggaaccagtacacctgaaagtgatactgattatcgtggtatttttcttgctaataaagaatttattcttacacccttctataaggtcaaagaggtagctgataaaagcgaagaagatactaaattctatgagttgaatcagtatttaaaattatacactgaagctaaccctaatattcttgaatcactttgggttgaacctgaacacattgttgaaagtactgaaatttatgactatcttcgttcatttaaccaaaaacttcttagttccaagattgcattttcatacactggatatgcatataatcagattaagcgtatgacaaatcatcacggttggatggataaagagcgtattgctgaaaaacgattaaatgagattttagaagaacaccctgttgatgaggttcttgtgtggatgtatgattcattcccacagtatcttgttgaacgtttagatacatccaacttacatccatttaatgctaaaaagattgattttgaaaaatatatgcgtgatacatcattgcagttagtttcgaaaaatccattaaagcaatatcattttgtaagattagtgcataactacactactgataaaattctagatcgtgatttcaatttattgaattttaataatggctatgaactaattcattacggagaaaacatttttgcgattattaaaaatccgaatgaaagtactatcaatggtgatggttcattgcgttatttttctaaagagcgtagtactgaagagttgaaaaccaaaccagaactaattgtaaaatttaacgaaaaagaatatcaggaaaatagtgagaataggaaaagttatcataaatggaaagaaaatcgtaatgccaaacgtgctattttagaatcacaacacggatacgactgttatagttacgatactgaattcttaactaaagatggttggaaattattcgacgacatcactgaaaaagatctattagcgacttttgataaaaatcacaaaatagaatatcaaaaatacacagaacgttttgataatttatacaatggaaatctataccatttcactggtcatcatcaagatacgttagtgactgcaaatcaccgaatgtatgttaagaattatgcacgtaatcagaaaaaagatatgtcagaatggcaatttgttgaagcagcacaattaaaagaaacttataaaattttgaatacattatctccaataacaaaggaatataaagataaaaaaagcccaattgactatatggatatcaaagtttatcttcaactaatgggatggtttctttcagatggtagtataagttttagagatgggaaagtaaaatcattatacatttcacaatcaaaagcaagtccgggtatgcgttgtgctttatcaaaatacaaacaatctgggcaaatgatatttcaggaatacattaacgaaagaaaagattaccaatcaaatgatgaatcaagatttgtatttccacgtgaagttgctgaagcattatataatgattgtggtcatggatcatataataaaaggattccaaattgggcatttgatttaacaaaaataaaaatggattttctgctaaaaggtttgttgcaaggtgatggcacaaaacgtaatttagttaatcatgatgacacatatgtatattatactgctaattcattattagctgatgatgttcaaaaactagccttactgtgcggttatgaaacatcaaaatggggaccatacacaaacgaaactaattttggttatattgaaatgtatcaagttcatattaatatgaaacctaaatcagaaaaaataaacatgaaacaaaatcttgaaaaaattccagtatctaactacagaactgtttgtttttcagttccgaacggtacactagttactcgtagaaatggtaaaactgcattacatggaaactgtaaacatgctatgcacacaattagacttttgaatagtgcagaagaagcattacagagtggaattattcaagttaaacgacctgatgcacaaatgttgatggatattcgtaatggtaagtggaagtatgaagaagtattagaatatttcgatgataaagtacaatacattcgtgatgttctatataagaaatcagtacttcccaaaaaaccaaacattaaattagcatcaaaaattatcattgatatcagagaaatgcaatggtataagtaa

SEQ ID NO: 147 - DNA, 402 bp, Asteriusvirus sp.
  source 1..402: mol_type = genomic DNA
atgactacagttgatgatatctatagcactatacgcaatatgagtacagatagaaaagtatttggcgataaagaaaaatctaagtgttatggtattgattcttttgatataatttcttatgagtacaatacaagtggaaatagttcactgaatatcgtctgtcctcgtgatccagaaaataattttatgtatgttgaaattaataatgatggaatgttttttacaaaagttttcaaaggtggaattaattacgaacctattgaatgtatgaatgaagaaactttctttcaagaagatacaattatcaatttaggttttagttttgatgattataaaacattagaacatgactttaatcgttattataatggtttcttaaaggagttaacaatttatctatga

SEQ ID NO: 148 - DNA, 450 bp, Asteriusvirus sp.
  source 1..450: mol_type = genomic DNA
atggactcttatcatcaaaaaagtccattgataaaagaatatgctatcaatgatgctaatagaaaaactatcattgaatacaaatatgaattatctaaatgtgatccaattgtttatcactttgcgaagtactgttcaaaaaatttatcggatatcacaatctaccacgagtcagtcccaatgagttttccttatggtgattgggtagatacttttgatatttttgatgggtcaaatggtttcagtttcttttactcgtcaaataaagcaagtgttcgtattaaaacagacataggttggacaaagcatagctcaaataaagaagattataatttattagctgacgtataccgaagtgtgaagaattcaaaggatattgatgaaagaattaaaaagcaaaatcgtatatctttatcacttgaaacatacaagtcaaagtatggtggttaa

SEQ ID NO: 149 - DNA, 516 bp, Asteriusvirus sp.
  source 1..516: mol_type = genomic DNA
atgttttttggatcagttggaaaacaaaacagtactttaatttggcatgaaattatctttaaaattatatctaaaagctactcactaaaggatattattaccacagataatgatagacgtatcctgttagatgcaaaatataaattgagcaaacaccctttactttctttaatcattgattacgtttgtgattatgaatctagtcgttggaagtgggaagacggcggtttatttcgtggaaaaacattctacggtgcggaacgatatgttttcagtgatacatcaaatggcgttaagtttgttattagaaactttaactccaaagaaaatgattatcttgaaagtggagtgaaagtatatatcgataataatagcaatgtactaacatatgacgaatcactaattatgttacaaataatgcgtggtgttgaaggtgtaagaaacaaccttactaaattgaaaatccagcaaaatgatatacataatagacagaaaattaagggtttatataaatga

SEQ ID NO: 150 - DNA, 567 bp, Asteriusvirus sp.
  source 1..567: mol_type = genomic DNA
atggttaaatctttgctaccaccaccaaaacgtcataaaatcaaagaaatgaaagaacaacgtacattaaagatgtacaacaatttagttcagttactgtgtaaaagtccatcgctcaaagcagagtttaaaactgatgatgaccgcaaagcactaattgagatgaagtatatgctcagtaaaatgtccttttacaaatttgtaaaagaatacacaactgacccatttagtcctcgttggagatccaaaccaagagagtatttttacggtggttcatatacggatcgcattcaagacacagtgatgggagttgaatttgaaatcgattatgagccgaatggtgtggaaagctggccgattgagaaacgtttaccaagtgaagaagaaatttatgtttatgcaagaaaactttcaaatttcagttcaagaattactctaggcaatttagattcatttattattttctatacacgtgttggtgtagataaaatggtaactaaactcaatgaactttcattacaacaaaaacagattaatgcatacaaagacattactgatttatactaa

SEQ ID NO: 151 - DNA, 2730 bp, Asteriusvirus sp.
  source 1..2730: mol_type = genomic DNA
atgtcatcaaaaagaattataggaagtgctgagatccttgggaacttagcaattgggggaaggtacgctatgcgtactttcaatggaacctcaccgaatgccaatactggaatagttcaatatccaatttataagcgttctgaagttcaaagtattttagatatgttaccaatatcacgtataggagagatggactacttaccattgaacgtaagtgggtcatatgagggtgctacacctatgtcaagtgatcaagtagtacagccaacgattattgaagatgatggaaccgccgttgttctgcgtagtgggaccaatggtagtactaaaggtttttattattcttttatacgagaaatccgaaatataaccatgatttcacaagaaagtgttatttctaccaataccatgtataaaccatccattatgagcagtactgagaatataaaatattttatttgttcaaatggttatgaaatgcttggctgtttaagtactgaagataattatattttcactttaacaaatggtacattcaacgaaatttcacatattcacgctaaagtaccaagtacatcatttggaaatgatatgccattatacgttcatattgtaggttctaaagtatatatttggtgtaaagataaaagtgtttctaatttaggtctagcactttctatatatacagttgaactaagtgatgtgaaagcaagttctatggcatctttaacaaaactaactggcctgtcaggtcaaacagtaagaagtactagttattcagcatccaataatctaagagtatttgataagttatatagcataggtgctagttcagattcactatttgaagttacatcaccagtatctaaagtggagttttctgattacactgacttcaatatccaagcaaatgttagtacagatttatctaaaatacgtgttacactatatcctacacatagaatggtaaccccattgtatatctctactgtgtatggaacgggtatcagttttgtttataatattaatgcgaaatcgatgtcacttgatggttcggctcgtgcaccagcttctgtttcatataataatggcttccaagttacaaacccatttgaaatagatatggtaaactttactggaacaacagctaccggagttttaggtaatgctggtgggttatgtcaaacaaaagatggtcttgtatttgcatctaaattcagatggagttctactgaattttatggtttacaaagatataaagttaatggtacaccatttgattcatgggtagccagtactagatccgcaagtaacgttataaatacaaacgttttaccagtttttggtagtgctgttggtgcaaacctattaggtgtacgtttcatcgataatagaaaaatattattagcatgttctggtacgtatgatgatgtaacatataattataataatactgttttttctgaaataggcccacaaccaacatatcaatataactcagttcaacataatactacattaaatggttttgcaccacaatctaatcgtaaacaaataggtgatgattttacatacactgctatgatttctcttgttgataccgatggtagtgttagatgttatggaacatcattcattgaaggtgtatataaaacaagtggtggattattaaacccagatactttagaatttgatgaaacatatacaatagaaccaacggtattagaatcattaaaacaagatatttttgctaatctaggaaactctggcattgttggtacactatctggacaaattgtattatattatgtacctgataatactttttctaaatccattgcagtagtttcagcatataatcttaacaataaccaaggttatgcaatttatgccgaagttgatgttgtattatctggatctaacataacttcagctacattggtaagtactagatatgagacacttagttctgttacaggaattattactgaagcatatatgaaacgttgtactggtctaacagttgctaaatattcaggatttggttatattggtgttgatgcagttcatcaattttcacaaccaggtaatgcacaatttaagatgatgatagctaaaacagtaaatggtgtcataacatcaaatcgttttttatcatctagttacatccaactcggtgcagcatatcaacatggtgttattcctggtgttggttttggatattacaattttcaagattctgactatcaaaccaaatctgtattcagcgtttttggtacaacatctgctgaaatggatggtttaattagcggaaatggtagcgttaaagaaaagattgtggtagtatcacaagacgttgcacaaggattctcagtgtactttacacgtgaagttccggtatttttaggtggaattttcgacagactacctatacaaagtgtagatttaagtactgtaaaaagtaatccagctaatactacgttctatttgtatatacaaatgaacaggaatactaagaaagcttcatatgttattagtactgaaactattgatgaatctttaactagcacttacattggtaagatagttactggaacttcaggaattacttcgattgatactgaaaaagtgactcgttttttgacatatcgcccaagtacaacgaaacgtggttcagcgatacctgccagtactggtgtaccgtctgggtcaggcacacgttggaaataa

SEQ ID NO: 152 - DNA, 588 bp, Asteriusvirus sp.
  source 1..588: mol_type = genomic DNA
atggcatttaaaataagagcagaccttaaagcaatgcaacaagtcacagtacaaggtaaaagtactggacttggtgtattaggtaataatatgacttattacccaactaattcaaatggggaatgtacattcccctctatcactaaagatgaagtaaactttattgtaaatggattaccattaacacaatatggtgaactttatgatgacagtagtttaaatatttcatctactggttataatttaacatttaatagagaaataccatcatttattggtggttatctttataagttcccagcggtatcaattcgtgcttcaactgtttcatcaggaacacaaacacaatacgtatatgcaacattagttctaggtgaaccaatttataaaatatcaccaacacaaatacaagagtcagaaattataatgtttattggtactcttactgtaggtacaagtggaataactaatatcatcattaataaagtttctagatttagtacatatagaccaagcgttacacaaaaaggttcttcattcccagtcagtactggtaagccatccgaaactggaactattggttggtaa

SEQ ID NO: 153 - DNA, 2697 bp, Asteriusvirus sp.
  source 1..2697: mol_type = genomic DNA
atgtcaaagaaaatatatggtggcttggatgtcacacataatgtgacagttaatggtaaaagaacaatacaaggtatcaatgaacaagtatttgatgctaatggcaatatggagctagatacttatacaagagatgaagtactagatatcgtcagtatgatgccaatttcccattatgggtcacaaaactatcttcctgctggtgtatctggtgatttcaatggtgcatctgaaaaccagacccaacgtagaaataaaattttattagaaaacgatggtacactcgtattattacgtagtggtacaaacggtagtgttgagggattatattattcatatttagctaacgcattatcagttgatgacatgagccgtacaattaacacaagtcgtcaatacaagcctggatttttcggttccaatcgtatagcaattggtttatataatacagatccaaatattttactcggtagatatattgatacatctaacagtactaatggattgtttatttctattactaatggtacattagatgataaattacatactggtttttttgtaaatcaagcagatatttgccctgaaggtggtatagaatttgcaatgatggcagaagatggttcaatctatgtctttagtgttcttaatgcaaataaccaactacagttagttgttgtccgagttgtatataatattagcaatggaacatatacggcaactcgtattactggatggactacaaaaacattctataatacaacttattctgcacagaataacatggttattactaatcaagtaacttcaactaatatagcagataagccttatgtgtatgtaccacaaaacctacgtggtattgggatttatatgacatccattgatttgtatgttgcacagcaaccaggaacacagaactttcgttttagaatgaatggtgatgcatggtttacaatggcgacatataatgcccgaccacaacatagctacagctttgcatttaatatgagtactaaacaatgcaccctagacgctgggaatgacataggttcatatcaagcaccattggttataaccaatactggttctgcattagtgcctacaggtaatgttttaaataatgatccattatataatcatgctaatgcaagaaacatttatagttcttatttttacttaagttcaggagaagctttttgtactgcgtgtcctaacttagcagaaccattacttatgcaaaaagcaaagtttcctatacaaattgtttatagtatgattaacgttcgtgcagtacaatcaactgattttaaaggtggagttgttagaccatcctttggttcagcagttggttcatttattaatggtgtggagttgttaccagataatagtactaaacaatattcacgtgcgtctggtagtggtgggtttagaccatcttatgcagttcataaaagtactcctaattttacatttaaatcattatctttaggaaccatacaaggttatgaacctacaactgaacgtggttatgtagatgataatgccaataatagaattttcattagtagtatttcaggttcaactgtaacaactaatggcggtatttttatggttggacaacgttattcacaatcattttcatatgataaaaacttaaatggtactggtgttattagtgttacacaatcagttctagataactttagaaatacagaatatgctaaagttctcagtgactggaacttatcttcacaagcttatcgtgatatgacattatttgttccacaacaaactgacattccggcttttgttatgttgagtactataacaaatgactataaaaactatattagaattgctgaagttaatgttaatactagagttggaaatataacatctattacctttaagcgtttagtactagaaaatacatatggtgataactttacacctaatggtaatggttcgattgcatcttcttctgttggattaacaatttatgatggtggttcattctacttcattggcggttcagaccctttaacgcatccaacaattggtaatactgcaactcatcaatttagagcatatgtaactaaatcaactgcacaatttacaagttttgttattactggttctcatgccagttatgaacaaggaagacaacccacagcgttgcctggtattggatttggtatttttgatccactggattatacaaataaaatgtcatttcaaaaatatggaacaacgatagcagactataataactggaccccacaaggtagcccaattaacgtagtatcacaagacgttgctcaagggtttattgtttattttacagaggaaacaccagttatactatcaggtaagtcttttacactaccagtttcaaatattgatttgagaactataaaatctaatccagcaaatacaacattttatgtatatgttaaattagaacaagggttggcaaactactacataactactgatgttatttccgaaacaggaacaactgcatataatattttttggataggtacaattaaaactaacgcaattcaaatcgaaactgttaatatacaaaaacgttcacgtttagatatatttggtgcttcgcttgaatcagcaggttcatcgttccctgttagctacggtctaccatcacaaacaggaaccataaactggtaa

SEQ ID NO: 154 - DNA, 471 bp, Asteriusvirus sp.
  source 1..471: mol_type = genomic DNA
atgaattaccagacgataatcaaggatgatttagtaaatggagagggcgttcgctgctctttatttgttagtgggtgttcgcacggatgtgatggttgcttcaatgaagaagcatgggactaccgaagtggacaagagttcagtactgaaacagttgagattatactacaggaactaaaaaaaccatatgttagtggtttgtcacttctaggtggtgatccattaatgaaaaagaatatagatgaagttttaaatctatgcaaagtagttaaagaaacttatcctagtaaaactatttggtgctggagtgggtatactttagatgagattatgaaaaatcattctaaagatatacttcagtacttagatgtattagttgatggtaagtttatcgagtccgaaaagaatttaaaattacctttccgtggttcaaataatcaaagaatactatataaaaataaagatttttaa

SEQ ID NO: 155 - DNA, 333 bp, Asteriusvirus sp.
  source 1..333: mol_type = genomic DNA
atggatttaaagccaattgtggttaacaaatacaaagaaccgtatgatgtgtatattggacgtgggtctaaatggggaaacccatttacccatattaaagataaacaaactaaagccgaattcattgttagtacaagagaagaatcaattgaaaaattcagagaatacattattgaacgtatttcttgtggagaagttaagattgatgaattacttgaactcgcagggaaacgccttggttgtttctgtaaacccaaatcatgtcacggcgatgttcttgtcgaaatagtgagtgcaatattagatgaattaccagacgataatcaaggatga

SEQ ID NO: 156 - DNA, 1806 bp, Asteriusvirus sp.
  source 1..1806: mol_type = genomic DNA
atgcaattagataaattatataccgatgtaacaaatttcctaaatcagagtaatactgatcttactaatgaaaacgctaataaagatgcaaaatgcgtcaatacacatagagatttactagcaggtattctatctaagcattattcacaagatgttattcccaccgagttaatgcaatggcataatgatggatatggtcatattcatgatttagattactatattagcccattgaccaattgttgcttggttaactatcctgatatgcttaaaaacggcttcactattggttgtgctaaaattgaagaaccaaaaagtttcagtgtagcttgcacagtactgacacagattgttcaagctgttgctagttcccagtacggtggacaatctcttgcacatatcgatgttggtttagaaccatatgtgcaaaagtcatggaataaacttttagaaaaacaaaagaaatataatctaagtgatgaattcattgaagaagaactacgtaaagaagtgtatgatggctgccaaacattactttaccaaactaattcaatgattagtactaatggtcaagctgcatttatttctcttagtttaggtcttaacacttctaaatttggtaaattaatcactgaacagtacttaaaagtccatgagaatggtttaggtaaagataagattactccagtgtttcctaaagtaattttctttttacaagatggtataaacatgaataccaatgatagtaattatgatcttaaacagttagctatgcgttgtgcatcaaaacgaatctaccctgactttgtttccgtaccattaaatcacaaagtgactggaagtggtagtactgctgtaacaccgatgggctgtcgttcattcttaggaaaatgggaagattcaaatggaaatgaacaatacaacggtcgtttcaatttaggtgtggtttctatcaatttacctctaattgctcttgagagtacttctgacggagagttttttgataagatagacgagcatatgaatattgcatatcgtgctcagatgaaccgcgtagagcgtttaaaaggcactaaagcaaagcaaaatccaattttgttcatggaaggtgcattagcacgtttaggtgcagaagaaaccattgacaagctattttacaatggttatgctagtattagtattggttatgttggacttgttgaatgttcagaaatcctcactggttctatcagtaaggagttttgtatgtcagtactgaattatatgaaagtaaaatgcgatgagttcaaaaaagagagtaatatagcttttagtctatatggaacgccagcagagtcactttgttataaatttgcacgttgtattgaagcaaaatatccttcagtactaaaacgtgattacatcacaaattccttccatcaaccagtatgggtagaaagttctccatttgataaatggagttatgaagaaggctttgcttacctaagtaacggtggaaacatcagttatgttgaatctccaaacttagcaaacaacattcaagcacttgaaacattagttaactatgcttacacgaagataccatattttggtattaaccaaccagttgaccattgttatgaatgtggcttccagggtgagttcagtgtagataaacatggtttccactgtccggtatgtgataatcgtaatgagaagacaatctcagtgattcgtcgtgtttctggttacttgggtaatccttcttcgcgtggattcaataaaggcaaacaacaagagtgttgtgagcgtattcagcacaaataa

SEQ ID NO: 157 - DNA, 129 bp, Asteriusvirus sp.
  source 1..129: mol_type = genomic DNA
ttgcagtgcacttgctgcatatatgcttttttccgcaccaaccaatgtattactgctaatttgggcagttgttatattagcagtactttaaaagcacccttgtggtgctttttctatttgtgcaaataa

SEQ ID NO: 158 - DNA, 186 bp, Asteriusvirus sp.
  source 1..186: mol_type = genomic DNA
atgcagaatgaaatctttaaaaaagaatacgatggtgaaagtctctatgatattcagagagatgtgcatgaagccttcgattcaagatttaacccattagctgaacaaatcccacaagatgagtttggttttcaagaagggacgttcacagtaactattacatggagtccagatgagactagctaa

SEQ ID NO: 159 - DNA, 411 bp, Asteriusvirus sp.
  source 1..411: mol_type = genomic DNA
atgttagccgatgattttatgtctctaagtaccaagatatttgatatattaggagatgaaatagatttccacctaaatgatacaactataccgttcgaagatggtggttatttttttgcatttggttataagtacaatgttgatttctcaattccgattcctgatggaagtgattatacatcatcaacatattttgaatttcagttcaacggacacaaagagcgtttactaacatatagacgtaaaggtaatttcagtagaccagagattatattaatggatattgaaaaacgaatagaaattgcaaagaataatccattcttcagttcttatgcgttaaaccaacttattgaactatttgatggctatccagacataatacgagggtcgttacgtatcaatgcagaatga

SEQ ID NO: 160 - DNA, 219 bp, Asteriusvirus sp.
  source 1..219: mol_type = genomic DNA
atggaaaaatatgacataatttacgattattatggtaaggcttatatgaagtgtgggcgttatgttgaactctctaatagagaatcaatagatccccacactcttataacaattcataattcgtactataaaaaagttacaatagctaatttcgctacatacgtgaataatccattatttccttacattattcagtactactgtcgagttataaaataa

SEQ ID NO: 161 - DNA, 360 bp, Asteriusvirus sp.
  source 1..360: mol_type = genomic DNA
atggctaaaactatttctttaaaaaatgaaaatgtaggacaacgcaaagatggtttctttggattctcatggacaacattattctttggaccgttccctgcattgtttcgtggtgactttattacgttcatcggtgcatttgtaatttacttcatcctcaacgcagtgtcattttggattgtgggtacaattgcaatggtcgtgtgggcatttctttacaataagtactacacagtgaatctcattaagaatgggtataaattcaatggcacacatgaagaaaatgctgaagctgcaatggctttacaaattgatttgaataaaaacaacacagttgataaaaacaaagatccagaataa

SEQ ID NO: 162 - DNA, 225 bp, Asteriusvirus sp.
  source 1..225: mol_type = genomic DNA
atgaagaaaatcgagcgttatacaaaccatactgttgtagttgaaaatgatatattttattattatattttcagacctatacattgttgccaaataacaacatacaatagtggaaggttttatgacaagaactttcacattactgagttagcaaaatattccagtactgaacactttagtaatctagtatatgtgtactgtataccaaacccaaataataagtag

SEQ ID NO: 163 - DNA, 369 bp, Asteriusvirus sp.
  source 1..369: mol_type = genomic DNA
atgaatagtaaattggagaaacttgttgaagaattacgccggatgccacctattgagcaagtagggaactacaagcggtatcgtgtgattgctcgtgcactggataaaaaaggtcgagtactggcaacacgcacaaattcttatacacagacacatccagtacagaaaggttttgcaattcgtgctggacgtccacaaggtgaatttctacatgctgaaatttcttgcttattagctgcacgtgctgatgttcatactttactgattgcacggataagtaaagatggtattcctgtacctgctaaaccatgtgaaatttgcacattagcaattatggaatacggggttaaggaaattatccacacatga

SEQ ID NO: 164 - DNA, 615 bp, Asteriusvirus sp.
  source 1..615: mol_type = genomic DNA
atgactacatcggaaaagtactggtggattttgggtcatcctaaattcataaacaaagatatggttccagctaggattgatatagaacctcatgatgtgtgtccaatgacaaatcgaattgaagatttcaaagcattgaatacaaagactcaattttgggtagaatttctttcaccaatgtatattgagcaagacgacgaatgggtacaagcacatgattatgaattggattgtggtggtgatacgtatgaagaggccattgatgaattatacaaaaatgttctaagaacatatggtgattacacccaacaagaagcggacgatgaatttaataagatccatgtagctatttcgacatcatcaatttataatcccactaaaaaagtttgggaggaacgacacagttggagttcatgtgtgatcgatgaagaaaccaaagaaaaaatcatcgatgacataaaaaatttaaaaaatacaatccaagccttgcgtgcattcataaagtcttgtacaatagaagaacagcaagaggcaaagatacatttggagagtgaagaatgtaaactttgggttctagaaaaatcacttgaaaagggtatagacttagacttatga

SEQ ID NO: 165 - DNA, 360 bp, Asteriusvirus sp.
  source 1..360: mol_type = genomic DNA
atgagtgattatgtagcatttcttcatcgctttggagaagctaaagaaaaacatattatccgtatgccattatatggtgaaaaagactggtacaaaagtactatcagtgtaggtgcatttcgtgaccgtgaagctggattctttctgggtaagcaacatgaacgagaggtactttgctcactttggcgtttagatgaatgggatagtgagaacgtaagaactgctgattcaatgatggctattgttggtattgcgaactatcagcacccatatgatctattacctacatttgaacatgcttctttgtttgaattttacaaagcagtagggtatgattataaaaagaaacgttacgtttaa

SEQ ID NO: 166 - DNA, 171 bp, Asteriusvirus sp.
  source 1..171: mol_type = genomic DNA
atgaaagaagtaattggctacaaatgtaaaaattgtggcaaatataagggtaagcattcaatacaagggatggcttgtccaaatccaggacgtggaaatttcagagggttcagtactgaaaagtcttacgaaccggatcataccaaacctgtaatgggttataaattatga

SEQ ID NO: 167 - DNA, 231 bp, Asteriusvirus sp.
  source 1..231: mol_type = genomic DNA
atgaaattattgtgtattgctattgtttcttctatggtatttctaagtgggtgtgctcctaaagttgatgagatggatgctgaaattatccgacaaggtttaacaaaactaaatcatcaaggaacactatatgcatgtcatactatgcgtcatgggcaagatcttaacctcatgtgcaggaagatagtgaatcgcaaacgtcttaatactgttccgaaggatgcacaatga

SEQ ID NO: 168 - DNA, 180 bp, Asteriusvirus sp.
  source 1..180: mol_type = genomic DNA
atgaaaattttacttgtactaatagcagtagttatggtattatcttgttcagttagtaatggtaagtacatttacatgtctgctttcgaaaaagcaccgacaaactgtgtacaaactcattcaggtattatgctaattaatggcagaccttcaattgaatacttatgtataggggattaa

SEQ ID NO: 169 - DNA, 657 bp, Asteriusvirus sp.
  source 1..657: mol_type = genomic DNA
atgaaaaatgtatcacaggaaaagattctgtatttcgcaaaatataatggtggttttaatatccaaagctgtgagtacactggaaatatggctaaaatgcttgactctctattaagcctaggattgattcgttgggatactaatgaactttggtacgaatatgcaggacagaaatgggaaagtgattacaatcatgcaatccatacatacaccattactaaagctggtgaagttcgtttagctattatgcgttgtgcatatacttataaaaacaacaaaggtgacgagaaacatatccgacgaaatcaagaactcattcatctcatgggggaagctggtatcaagatggatactttgttgaatgagccacgttgggttaacaatctcaccaaagcagagttgaaagcactacgttacattaccaagcaagaagtacaaactcctaaacctgaaaaagtactgaaaggtgatggtgagttgagtcttcaaaatgtatttgaaagtaccagtactgaaagtattacagacatttctgtacagatggcactaaaagcaatggaacttttcaagacacaatatgaaggacacaatgctgaagaagttgagcgtgagtttattactcgtgtacaaattgagttacataaaaataaaaagtag

SEQ ID NO: 170 - DNA, 330 bp, Asteriusvirus sp.
  source 1..330: mol_type = genomic DNA
atgaacaaaattgacgttactgtagtgattggttatattgaaattgaaccgtgtggcattgatacctttattgacactcttaataagtatcgtgctgaatataacggtcacattagtctttcacccgacagtggttacggcggttttcatggatacaatgtaatttggaccagagaagaaactgacgaagaatataatacacgaattgaagctgaatctaaaagatgtgaagaaattgaacgtcaagaaatgaaacacttaatgaacaagaaatcattaagtgcagaagataaatctaagctactaaaatatattaaggattacatgtaa

SEQ ID NO: 171 - DNA, 558 bp, Asteriusvirus sp.
  source 1..558: mol_type = genomic DNA
atgttttttgaccaaacatttacgttgtatcacgattctggtaaagttgagattattgataatctgttagagtacattgcggaacatgacggtatagaccgtttccacagtaagatgaaattcgatttagctgaattcaacaaaaagaatcgtgaaacattttggaagaaccgtttctattacgaaatgtttccagaaaagtttgtgggttattatctttgtactgaaaaaggattacttgtatctcctgatttacttatgggtgaatacatgatactctataatgagtactgggaacataaacgtaaagctcgtgatacggaatggcgacataagcgttcgtatatgtacaaacataaccactcccgatacaagcgtcctaagactcaacaagagcgtcgtatggcttgtgcagtactgaaggatgagggggaacctgatatacgtggaagacgtaagatgcgttcattaccatcgtattgggacgatatcagaacaagacatagtactggctggaaatacagtacaaaacgtaaacatcaatacaaagggagctaa

SEQ ID NO: 172 - DNA, 159 bp, Asteriusvirus sp.
  source 1..159: mol_type = genomic DNA
gtggagttcttaataaatacttttataagaataataatactttttattaaattaaaaagaactccatgtgttatttcagtttttcgtccctgtcttttggcagggattttttatatctatatcttgacaaaaggaacaaatcatgagaacatgtattaa

SEQ ID NO: 173 - DNA, 189 bp, Asteriusvirus sp.
  source 1..189: mol_type = genomic DNA
atggctaaacaacctaagaaacaagaaccagtagcaaaagttaagaaagagaaagttattcaatccaaagaacaacgtatgtacgaacaacgtaagagtgaaaccctatccggtctacaagctctacgcaagcaaggtgtactaactcgtgcacagtaccgtgaactagtagctcagaaaggtttttga

SEQ ID NO: 174 - DNA, 1440 bp, Asteriusvirus sp.
  source 1..1440: mol_type = genomic DNA
atgaaaaaatatacaattgacacaaacgtactactatctgaccctaatgcatctattgcttttgatggtgctgcaatcattctaccatttacagtactggaagaattagattcgattaagagtcgtaatgtagatgtttcacgcgatgctcgtgttgctattcgtaacattgaagcaattattgcagatgcatcacatgacgagattagtagtactggtgttaatattgctgatgttcataccaatatgaatcctgatagcaaattgtttgttattacaaacgaagaagctgaggcactaattcgtactaaaggtacagaagagaaagttcaaacccttctcaaaagtactgtacctgatgataaaatcattctggtagctttagcaacagaatcagtactggtaactcgtgatatcaacatgcgtatcaaagcactaagttatggtgtcgaggtacaagattatcgccatgatattgttattggtgatagtgatttgattcacattggtcaacaccatctggaaatcaatttttgggaagtatacagcaacttaaccaatactaatattcaatccgaacaagttggtcgtcgtttgtatcattacatttctaaaagcttgattgaacatctgcttccacaaaatctatgcatcggtgattatctatatgatgatgctgacgtattatttgtgtacgaaggacaatcagcaattgaggaagatgatggaacactaacaccagaagatattttggtattccaagacattggacaatcagtggctttacgtgctaaagtatgggatattaaagcaaagaatatccaacaagcactcgccatcaacagtattctcgatcctgatgtacatctaacagtactactaggttctgctggtactggtaaaacactaattacaattgctactgcattagaattagtactggaaaaacgtaaatacgaccgaatcatcttctctaaaactcaagactcacagtttgaagatattggtttcttgccaggttcagaagcagaaaaagtgattccattctgtggagccgcgattgatgcgttagagtttcttcataaagatgatgccaacccacaaggtagtattgaagagattatgaaacgtaatgttattcaatttaaagcactaaactttgtacgtggacgttcattcaccaacactattctagtagttgatgaattccaaaacattacacctgcacaagcaaaaaccatcttgacacgagcagggttaaactgtaaagtagtaattatgggtaacttgagtcagattgacagtaagtttattagtcctgttaacagtggtttgacatatgtaactgagaagtttaaagactgggcaggttgtcgtgtcatcgaactagaaggtgttgttcgttcaccactggctgaatttgctgaagaaaatatgtaa

SEQ ID NO: 175 - DNA, 303 bp, Asteriusvirus sp.
  source 1..303: mol_type = genomic DNA
atgattcaaacacacatcaaaagtcttatttgtactgttctgttaggtgcaggagttctttggttcggacagtatcacgagaacactaagcgtaccaacattcactacaataccgcagaagttgttagtttaggacaatgtagcgagtccaaatgttcattcatgtataaaacccaaagtggtgaagtacgtaatggactatcaagagaaccagtttcaattggtcaacttgtttaccaggagtgctgggaagaaaaggttcgaggttcacgttgctatgttgaatacgaaccaaatatgtaa

SEQ ID NO: 176 - DNA, 321 bp, Asteriusvirus sp.
  source 1..321: mol_type = genomic DNA
atgtcttactcaatgtttttggatgatattcgtgatgcaaatctatattatccaaaccaagatatggtggtatgtcgtgactttaaaagtgcatgtgaatatgttattgaaaatggaattccagcatttgtatcattcgaccatgacttgggtgatgtgagcgaagacgaaaagactggatattcttttgctaagtttcttattgattatatgtttgataataatattaaagaaccgtttgagtactttgttcacagtagtaatcctgttggtaaaattaatattgaaacatacttaaacaatggatttaacgcattatga

SEQ ID NO: 177 - DNA, 552 bp, Asteriusvirus sp.
  source 1..552: mol_type = genomic DNA
atgattgttaaagaagttccctttggtgaatatggctcacgtgcaaattttgtattttgttatttctttgcaagaaaatgtaacccttacaaaaactatgagttgaatgatataccagaagtaaatttagttttactacaattacgatgggatggtcttcttggtggatgtggtggaacagtagaaagtactgatatctcattagaagatgcgttgcgtcgtgaagttcaagaagaaatggattacaatatttttgtttcccatcttcgaccactcaaaacttttgaaatttacccaggtgcaaacagtcatagttttagctatgaagtaagctatgacgagttgaaacacattagagatggatacactaatgctaaacatgcgagtgctgaagttgctggtgtaaatttatgtcatatttctcgttattctaagggacaaaatcgagaagcgggatataataatcttatgacacagaacttcatcggtacagcaaaacaagaattggagtatctggttcaaaaagaaaacttactaattagttatctatag

SEQ ID NO: 178 - DNA, 753 bp, Asteriusvirus sp.
  source 1..753: mol_type = genomic DNA
atgatatcagaaaaatttataagcaatgaaggtaaaaaacgattactgattatatcaggtgcaggactttccgttgaaagtgggatggaaccttttcgatttgatgatggtttgtgggatacatttaaaattaatgatgtatgtaacattgctagtttaactacaaaatatcatgttgttcattctttctataatacattacgtgtaaaattgggacaatgcgaaccaaatgcaatgcattattttataaaatcgttagaagatcaatatggtgattgcttccttcatatgacttctaacatggacgatctttatactcgtattggtggtcatgagcttaaacttcatggaaacttgtgcgaagttattgaaaattatagtatcaattctgatgattataatgttattaactgcggatacgaaccatacataccaaaacatgatgtttttgctaaaccaaatgtagtaatgattggagaatatcatcgttatgttgatggtatacgcttaccaatttacgaagaacgaaataatgtgttgaaatctcttaatgaaaatgatacagttattgtaattggtagtagcgatacagtactggtatggtcgagattagcagcagcattaccatgttatagtgttaatgttaacattcgtaaaaatgataatgattttttgtttaatgaaaaagttatcaagccagcaaccaaagcaataccacatctagagactataattaaggaacgtatgaaatga

SEQ ID NO: 179 - DNA, 195 bp, Asteriusvirus sp.
  source 1..195: mol_type = genomic DNA
atgatggcatacacaatttatgaatgggttttgagtttttttatagttttttttattgttgtaatttataacaatgctaaatgcttatacagggacttgaaatccaatggttatcacaaagataataattttatgtatgcctatcatattggaatcattctgttattatcaatatatttaattggttttttataa

SEQ ID NO: 180 - DNA, 597 bp, Asteriusvirus sp.
  source 1..597: mol_type = genomic DNA
atgacatgtatcattgcacacactgatggtgtaacttcttttattgcaggggacaaactgggaagtaacgggttcacaaagtccgttcaaactgagcctaaagtatttgagaaagaattcattaaaatcaatgatgatgctggtttgacccgtacaaaagaaattatggcgattggttacaccacatcattccgtatgggtcaacttcttacttacagtttgaatctaccacagcaagatgcaaatgagacgtttccacagtacttagtactgaaagttattcctattattcgtcaaatgttcaaagaggaatggggttctcgtgatccttcacaagaagtaggtggtggacagttcatcattcttcacaatcatacaatttatgaagttcaagaagatttttcagttcttcaaccgaaaacacgaatcaccgccgtaggtagcggaacatatcatgctattgcagcaatgcaagcatatattgaagttgaaaatgaatcaaaagtgccactacatgaacgcatcaaatcaatttttaaaattgtcagtgataatgtaactagtgtaagtgccgagtttgatgttttaaagtattaa

SEQ ID NO: 181 - DNA, 135 bp, Asteriusvirus sp.
  source 1..135: mol_type = genomic DNA
atgaagttcaattcaaagtttgaagcaataatttattatgttctggcaacatcatatttggtgtgtctaatgttattaggtacattgatttatattttatatacaactttatttgcaattggagctattttatga

SEQ ID NO: 182 - DNA, 147 bp, Asteriusvirus sp.
  source 1..147: mol_type = genomic DNA
ttgttattaattatattgagattatataactatgacaaacatccaaaatttgacatctattattttttatgctacagtagtgatgtatattactgtacttttcctaacagttttcatttacaaatattacaaaaatggctttattga

SEQ ID NO: 183 - DNA, 609 bp, Asteriusvirus sp.
  source 1..609: mol_type = genomic DNA
atgaaaagactatggcttgaggtagtacaagcagtaatgcttctgatgttgataaattttccagccagtgctggtgttgaaagtaaaaatgtgataaagtacaatcctgaaacacgtaatgtatatttcatctcagatattacggatgggtcactaaagcgtatgatggagttgtatgataaagaacactatgataccattaccatcacatcgccaggtggtgattttgatgctgggattaaaatggcaaacttcgttagagacaatggtataaatttaattgtttctaggtattgcaactcagcatgtactgtggtattcttcagtgtagcttttgaaaagcgatacatgataaatcgctcagtactgggacttcataacatttctattaaaagtaatgttaaagacgatgataattcttttgtatcagttaggcagctatcaacttttactgaagaaatggcaactaaagtaggttttctatttacactatattctgcaaatggaattccaccagacgttctatataaagttagccgttcgcgtggtgaagatgttgtaatattaacaaaaccagaactggttttttacggttcagtcaaacaataa

SEQ ID NO: 184 - DNA, 147 bp, Asteriusvirus sp.
  source 1..147: mol_type = genomic DNA
gtgaatggaaattggtcttgtcctgcgattggttcccccattaagggcactccttataaaaaagctttacatttggtatgggtttgtgatagaatcttcacagtgattgtactaaggggattatcagatgagggaaatttgagttaa

SEQ ID NO: 185 - DNA, 132 bp, Asteriusvirus sp.
  source 1..132: mol_type = genomic DNA
atgggggaaccaatcgcaggacaagaccaatttccattcactttaggtggatatttagttgacggtgtaaatataaaaggtacaacaatctgtaaaagtagttgtttattaataagaggaaataaaatatga

SEQ ID NO: 186 - DNA, 378 bp, Asteriusvirus sp.
  source 1..378: mol_type = genomic DNA
atgaaagctatagcagcacaaggtaaattaccattcaatatcggcggcttttgtgtaaccgccgctaatataaacggtgaattgaaatataacttgaacatctttaatcaacgttctagttgtgtttacgatcttatcgacactgattttaatgtttatcgttttgtaactataacaagttttgataaagataaaatcagattagatgcaactaaaactgcactagagattgcaccaactttagcaaaaaatactttttgtattaagattgatgatagtgcatttgccgaatcattccagtttcataaaattaaattgagtactggagaaatgaaatatcacccttgggatttgtattattgtaacatccctggttaa

SEQ ID NO: 187 - DNA, 255 bp, Asteriusvirus sp.
  source 1..255: mol_type = genomic DNA
atgacatttatgattgttggattactatcaatattagtattattttttataacagtaatgtttgttattgatgataatgacatttctcaacgaaactatgaagtgcgtttttctgcacaaaataataagtactatattgtaaactgtatacaccgtagtgagaaaagggtaacaagtagatttggatttaccatttattataaagaccgagtagaagctgacatgatttgtcagaagcttaatactgtagaataa

SEQ ID NO: 188 - DNA, 480 bp, Asteriusvirus sp.
  source 1..480: mol_type = genomic DNA
atgaaacatacgacttggttgaagatagcagaagtagttgctgaggaaagtaaatgtatttcacaaaaagttggttgtgttattgttaaaaataatagagtattgagtactggatacaatggaacgccatctaagcagccaaactgttgtgatgtaaatcaacatttagtgaacgatggtcgttttcaagactgggttgatgatgcagcaaaacatgaacatcatgagtggagtaatattcatgagatccatgcagagatgaacgctttactgtatagttctcctactgaacgccaaggagcaactctttacacaactctacaaccatgctatacttgttctaagttaatcgcaggtagtgggattacccgtgtaatttatcacaaaagttatccacgaacaccacctgaagcgattaaagtactggaagatgctgggattattgttaactgcatttatgacaagggtatgaatcaatga

SEQ ID NO: 189 - DNA, 525 bp, Asteriusvirus sp.
  source 1..525: mol_type = genomic DNA
atgaaatacacacacctaagtatagatgatactaatatctggttagataacataatcaagacattagaattaattaaacttacattacaaaaaactactgatattgaaattaatattaaacaagaaatattaaactattatcatagaaacaaatatagcacgtttatctctaaattaatttatggattatatgatattgaagatatttgcatcggttacagtactggtatttgcttcactgttaatggtttaaaaaatgatttaaatttcagactttccgatgaagagcaagattttcgtagattttgtgataatattatggatacagacaaaattacatttgtgattgaattaaatcaaacatggtctacatatgcagataaaccatttgaaattaatgaaacagatgtgttaaactatattcgagttatgaaaattcatgatttgtgtaaaaacgcattgttaagtattggagcttataatgaaacatacgacttggttgaagatagcagaagtagttgctga

SEQ ID NO: 190 - DNA, 549 bp, Asteriusvirus sp.
  source 1..549: mol_type = genomic DNA
atgcagcaatataatttaactgaagaacaaagtgatattttttatcatcatatgtttttaattgatgagtttgctttgaaaattaattctgaagcaattgatatattgaagaaatggtattcatgttataataaaaacaaaaagtggtattggtttaatagaaatttaaagtcatttttaaaaacaataacacaagttgatagtgtagaaatgatacatagttcaattggatatagttatttgactaaacacaataatactatgatgttatccggttttaaagttgaaagaatttcaaagcttacaggtttatcattaaaaacaattttatatgatatagaaaagatttggaaaactatagaattcatgcacaaaaatatgtcattcatatatagaaattatgatatattcactgatgtacgtcaatatcataataaaccttatgtattgaatgaaaagtactataatcatatggaagtttgttctaaactcgttgatgattggaatctagagggacataatgaaatacacacacctaagtatagatga

SEQ ID NO: 191 - DNA, 99 bp, Asteriusvirus sp.
  source 1..99: mol_type = genomic DNA
ttgctgtatatcaattttcatcgatcaaaaaatgatctatataagctaaatacccaaggaatcattgttactagggtaggtgaatatgcagcaatataa

SEQ ID NO: 192 - DNA, 447 bp, Asteriusvirus sp.
  source 1..447: mol_type = genomic DNA
atgtccaatgcacaatataaagatggttatgacgcatacaaagcaaaagtagttctaagtgctgaacagctaaaaatgcagcatccattatatcgtcagggctatcgtgcagcacaagcagaagcaatgaagaaaaataatgtaactttccctactacgctatatgatattccaaaacgtccacacatttttaaagctgaatggactgatattatggcagcgacaaagcgtccacgttttgctaaattacacaccgatgaaggtcgctggttgctaatggggattatgaaagcagttgagaatcaatctcataagattgttcgttataaagatgttgttgctatggttgataaagcatttgaccttgtacttcaatatggttatgatgaaggtgtcctaactgtttctgattgtgaaaaatatcagtacaccccatatcaaaaataa

SEQ ID NO: 193 - DNA, 291 bp, Asteriusvirus sp.
  source 1..291: mol_type = genomic DNA
atgaaagtactagtacgtaataatacggaagtagcaaatgtattagaagattccgattttattaatgttgcgttcgatcaaattagtgcagtagcacttgagttaaaaaatgtggatgaatctgagcgtgtactgaatggttttgcaattgtacttgaattaatgaaagaagtactaattaaaaagaacattaatccagttgatgcggttcaacatgcagaagctgtgcgtaaagaacacggtacattctctgacaaaaaatacattcaaactgatgaggtaaaagaataa

SEQ ID NO: 194 - DNA, 696 bp, Asteriusvirus sp.
  source 1..696: mol_type = genomic DNA
atggttgaacaattcatgtttggtggttatgctaatggcgaagtacgtaacatttctattccttacgtagttgagaaagttaatggttcagaacgtacatatgatctagcatctcgtatgatgcaagaccgtatcattttccttgatactgatttcaatgatcaaatggcacatatcatcaaacaacaattggtgtggttagactcacaaggtgattcccctattacattctacattagttcaccaggtggttcagtacacgcaggtttgggtattgcagacgttgctaagtcttgtatttccccaatccgcactgtagttatgggttatgcggcatcaatgggttgctatacacaatctgttattggaactaaaggtttccgtttaggtggtaaacgctcatacttcatgtgtcaccaagtaagttctggtacacaaggtctaattacagaccagaagatttccctacaacattctgatgcactgaatacattgttgaccaaagaaattgcagaagcagtaggcgtatcacatgaacaattactaaaagatgctgaccgcgatttgtggttaaatgcagaagaagcacttgaatatggtgaacatggtttcattgatggtattattcttggaccacgtaacgaagaaggcaagtacttagttaagcgtcgcggcggtgtggaagagtgggtgtaa

SEQ ID NO: 195 - DNA, 405 bp, Asteriusvirus sp.
  source 1..405: mol_type = genomic DNA
atgaatatacgttcagtacgaatattttcatttgttgatatgaatgaaaaacactcttatgtgtttgaaactgtcaataagttaaatcctcatacggcaaaaatgattgaaaccatgaagatcttgagtttgcatatagaagtttactatcttcatgacgattctgtttttgtatatgatgatggatggtatgacggtgtgttttatgatgacattagcactactgctgattactactttctagtgagtaacccactattcagtactaaaactttgtttgacattaccgatacaagcgtgtatgatacaagtcatgttgagttacttaagtttgatccagtattattcaacaaagaaacggcgtattggatgactgatttcttttcaaatattccagtaaaatag

SEQ ID NO: 196 - DNA, 384 bp, Asteriusvirus sp.
  source 1..384: mol_type = genomic DNA
gtgtcattgatttattttgaactaccagaatataccaattatccaagccgagttatttgctcagtttatagtaatgcatatcatcacttgttagtgaatagtaataaagctgtgcattattatcgaaataaagaaccacgtacattaaagaatcgttatggttttgacccaactaacactgaagttgaactctgtgatctgtttggggaagtaatggtggtgttgaaacgagatattcatcttttccatacatacaaacttaatcagtactttatggaaacactgtctatacgttcccatgctccgatgattaaagttgatttgaattatgttgatgataaattgaaatatgatttcataaattcacttgtttatttggagtaa

SEQ ID NO: 197 - DNA, 792 bp, Asteriusvirus sp.
  source 1..792: mol_type = genomic DNA
atgaaatttgttgtaacatctgacgtacacggtggaactgattacctccatagcggtgattacagtgatgtagtactgatcattgctggtgactttgatgaagttaaacgcagtcgttatcgtactgggatcgaagaactgtgtaagcagttctataaggtagtactggttccaggaaatcacgaatactacggttccaatatccaaaagacgcatcaagtactgtccgatatgcaagatgagattccaaatttcatctttttgcaaaacaaatttgtatggctggatggagtactgcttgttggtagtactctgtggacagacttcgataaaggtaattctttgacgaagtttgatgctcgtcagaagatgaacgattacaaacatatccgtcatggaacaacatcagagccttggcgtaagaaactgacacctgatgatactgagtttatgcatcacaaagataaacaatttatcaaaaattctattgacaccgttcgctttatgcatgataatgatttcaaggtcatcgtgattactcatcacgcaccaagttatcaaagtgtttcaccaaaatataaaaatgattcactaaatggttgttactgttccgatatggatcagtacattgaagatttgggtgctgatgtttggattcatggtcatgttcatagtagctttgactaccacattggtaagacacgtatcatttgtaatccacgaggctatgaatcgtatagtggagcttgtgagaattttgattacaatcctaaatttgtatttgaaatttaa

SEQ ID NO: 198 - DNA, 1419 bp, Asteriusvirus sp.
  source 1..1419: mol_type = genomic DNA
atgagcattttagcaattcttgaaagcattaaaaatactagcagtactctaggcaaaaaagctattcttgaacaaaataaagataatgtaactttgcaaaaagtactgaaatatacactcgatcctagtattgtaagtgggtataaaaagctaccagacgctgataacgtgtatcaacatatgacattggatgaagctattgataaactagaatgcatctataagcgtgcattgacgggacatacagggcgtgatttcattgcttcagtactaggtagtgtgagtccagatgatgctgaagttcttcgtaagatgcttacaaagaacttagattgtggtattcaagaaaagaactgcaatgatgtatttggtaaaggatttattaaagatgaaccatatatgcgttgttctttgcttgataaaaagactgttaagaacatcaacttcaaaggtcatggttatgctgtctccgaggtcaagatggatggtcagtacttaaaccatgtagtcattaatggtgctcttacctcttcctcccgtaatggtaaactatatgacttcttaggttgtcgtgatggtgagatggcaggtcttgcacatcaaattcaaatgaatgatgaacgttttagtagtggtgtcgtctttatgggtgaaggtctagtacttgataatgacggtgaaactattcttccacgaacaactggtaatggtatcattcagaaggctggtaaagatagtattagtcagaatgaagcaatgcgtactgtatttgtactatgggatgttgttccgtatgatgcattctgtgaaggtacatggaatgtaaaacgtaaagaacgtcgcgaacttcttgaatctgccatcaatgtattgggtagtgattttgtacgtatggtgaaataccgtaaggttcaaaacattaaagaagcatttgagtacaataacgaactcatggttcagggtgaagaaggatcagtactgaaatgtgaagatggtatctggaaatcacatacatctcctaagcagttgaaagtaaaactaaaaatgcaattggatttgcgtattgttggtttcaacgaaggtgaaggtaagcgtaaaggttcacttggttctttacaacttgaaagtgcatgtggcacactgaaggtaaatgtaggaacaggtattaaagagaaagatgcagagtggacgttcaaaaccatttgggaacgaatgcaagaactaattggtaaagtcgttaccgttgagtgcaatgagattgtaatcgacaagcgtacaggtgaaccatcactatttttaccagtgtttattgaatttagatttgacaagaacacatgtgacgattatactcgtattttagaaattcgtgatagtgctgttgaggtattctcgaacagtatcattgaagcacttagctaa

SEQ ID NO: 199 - DNA, 1200 bp, Asteriusvirus sp.
  source 1..1200: mol_type = genomic DNA
atggattttccagagaagttatttgttgcacgttcctatgtaaaccacaaccaagttgatggttttattatcgatgcaacaaaatcacatacaaaagcgtttgaaacaaagaaagagagagcagagtactgggcaaagaagaacaatcttccatcgttatatattgacaacgttccaaccacgggattttgtgtagttgataaattaacaactcatgcacgagaaacatatttcacgatccgtcacccagaaggatttgaatttatgattagtgcaaaaaacatgaatgatttaattatcaataacgatataatcaaaggtgtttttgtagacccaatgtttttcaacaataacttagaattaattaatggtaaaacaaaaacgtttgctaagttagttgaaaaagaaaataaaaaagaacaacaaaaagaaactgtagcaggtcttaaagttggtgatggtttcacttatcttaaagaagattactattactgcggtaaagtacatgcaatttgtataaagaaaactaaagaatttgcatatcccgacaaaagttcagtttatcatttactttttaacagtactcgtggaacttatgcattgaatcaacgtttggataattacaatcttgaacctcgtgcactcttgaataagaagactacggcagatgaagaaattaaacttgctaatgaattttggcaaagctatagaacaaacagacataacccattaggtgaatctaacattccagtactggtacacaataaatcatttaaagcaaaagacctaaaaattaaatatgaagaaataaatgttgatgatcttatgaataatggacgtttcaacgagaacgtaccatttatgactaaagataatgaacaatcttatcgcgtattttttggtgtaagtaataatacaacacgtagttattatggacgtagcggggattataatattcattataatgataaatttgaacgctttagtgcatacccagttcaaattgatgataatggaattatgtcaatggatgttgatattaatgagcacacatcatttagtacatggaacggttatcgttcaccattctttccaccaaatgaacgaaaaacatcaagttctcgttactaccaagataagccgtgtcacgttcaactatcaattagtaatccactttatattggaaagtattatctataa

SEQ ID NO: 200 - DNA, 414 bp, Asteriusvirus sp.
  source 1..414: mol_type = genomic DNA
atgaaattgtattgcttaactaatatgtactgtcaaggtgtccaagctggtattcaagcattccatgctggtgttaaactaattaaagaatatgaaggtactgctttcagtactattattgatgaatggtactatgaacacgaaactattgtagtactaaatgctggtggacatgataaattaaattcttattataacaaccttagcaaacaggggaaagttccgtttgccaaattcaatgaagctgggttgaatgatgctattacctgtgtagcagtactgtgtacgtctgaaatgattgaagacatggctgttatgcgtatgaatcttcctgctggtgatcaactaatgcaagtaaaatatggtgcattgtttgacacactaaaagcaatcagtacaatgaggactatttga

SEQ ID NO: 201 - DNA, 228 bp, Asteriusvirus sp.
  source 1..228: mol_type = genomic DNA
atgaaagtaattcaagttatggtagaaaaataccaaactgaagatggtcgtatttttgattcagctaaacaagctgaacaccatgaacgtattatttcgggtgcacgtaaagtgtgtcctacatgtagtggaacacaacaagtaccgtcagaagattaccgcagcttttatgcttgtccacactgtgatgggaaaggctatgtagaaaaacaagaggtatggaaatga

SEQ ID NO: 202 - DNA, 270 bp, Asteriusvirus sp.
  source 1..270: mol_type = genomic DNA
atgcatgatgtagttaaaaaatatttgaatgatagatatattatgaaaaaatctattaattctatcctaaaagatcatgctaatcaaatacgtgagattctatcaaataaacttattggttgttcagttgagttcaattacaaaaagaatgtagtgaagattggagttattaaacgtgtagttgctgtttatgaccaaaatgtatatgttgaaattgaatatgatggtaaattatcacaattaagtactgaagatttaacatttttataa

SEQ ID NO: 203 - DNA, 744 bp, Asteriusvirus sp.
  source 1..744: mol_type = genomic DNA
atgaaacatttcttagaagtaaccgtacctgatgataaagatttatacattgtaggtgatttgcatggtaatggtaaactatgggatgctacagtgaaagaatttggtattacacacaatgattatgttttcagtgtaggtgatattatcgaccgtggagaacaaaattcaaagctcctttttgaatttttgttcggagaaaatcgttacatgattgcgggtaatcatgagatgatgtgcgttgattcggaaacacttcgagattggtatcattgttggataagtaatggtggtgataaattccttgatgaagttggaggaacaggcattcaattctttcgtcagtacttaaaagatctccctatgattatccaaatcaatcaccgaggcttgaagattgggttagttcatgctggagttccgttggaatatacaacatgggaacgatttgttaatgggacaaaatcacttagtgctgatataattgataagtgcttgtgggataggaaaacattcgattattgtagaacgaataatacctattatgcacctaagttagatggagtgcattgtgtctttagtggacatacagcagttactgatccactcatttatggtaatcgcatttggattgatagtcaattcttgacgggtgacttaactctcgctactccacaaagtggtgggatgagatacttacgtaaagaaaaagatgagtactcattcaatcgtttcaaaaggtaa

SEQ ID NO: 204 - DNA, 252 bp, Asteriusvirus sp.
  source 1..252: mol_type = genomic DNA
atgttcaacaacgacttatcacatttgcgatatcttatgtctttggctgatgattttataaatgatctgaagccaaaatatattggtcaagaagtacgattaataaactccagagggtatggaaaatatattattactgatatgtatattagtggtggtgaatggcgttttaaaattaatacttatcttaaagatggttcttttgctggaacacaagttactaaacacactaatattatatggttggagtaa

SEQ ID NO: 205 - DNA, 216 bp, Asteriusvirus sp.
  source 1..216: mol_type = genomic DNA
atgataacatttttcgcaatatatggatttgtagcatttgttacatttataaccaactttctagtacttaattggggttgttttaaagatgaaatcatgattatcatgaatctccaaacagcagcactgatggctattatttggcctgtaacgttagtatatatttttatttcacttacccaagatattattaacaaatataagagaaagaaataa

SEQ ID NO: 206 - DNA, 330 bp, Asteriusvirus sp.
  source 1..330: mol_type = genomic DNA
atgtcaatgaaaccactaattcaacataatattttttataggtcattattcaaaattcaagatgatttttatcagacgttgagtaatgatcttataggtaaaactgtacgatattcggaacaatacatcaaacgtatgacaagtcagtatattgaccctgaatacgaatacgacattgaacacattaatcccaatactagaatgaaaatcattgagatatttaagaatgggagaactataggtgctgaaattgagtacttgaattgtgattgttacatagatacagagttgagtttggattatcttgttttagtggatgatgaggaataa

SEQ ID NO: 207 - DNA, 639 bp, Asteriusvirus sp.
  source 1..639: mol_type = genomic DNA
atgttaaccccaatcattcttagcagtgcatatgtaatcggtattattatttctggtatgcttgcatataactataacagaagtgttctaggttatgtagtacttggtacagtactaagtccagtgattgctattggtcttcttgttatgctaggtgagaaaaatacaaacttctttattactaaagaacttgataaaatcaccccagcaccagaaacagttattccagaagttaaagaagaagttaaagaagttaaagaagttgaagtgcaaatgcaagttaaagtgtataatacacttgaagaaactgaccctaaagttgtagtgaatgtagttccagtcgttgaagatgtgaaaccaaaagctcctaaagcacagaaaaatactaaaactgcaaagaaagctcgttacactaaaggtaagaacaaaggtaaatctaaggatgaaccacaactaggtgttcatgaccatactgcacaaattgcaacggcggcgaccgcagcagcaatcgtaacatcaccaatctacaacaatgatgattacagtgattatagccgtcacagcagttcttcctctgattcttgttcctatgatagctctagttctgattcaagttcatcttctggaagttgtgattaa

SEQ ID NO: 208 - DNA, 285 bp, Asteriusvirus sp.
  source 1..285: mol_type = genomic DNA
atgctttctagttcgttattgcacattttcagtactaataatttatacaatacccaggtgttagattcaattagtaataactatgtggtaagtatatctgatgaaatatgtccatttaatgcgtatacgaattatagtgtagaagagtttcatatatccgagattcgatgtggttttggtgcttggttagttctaaatgaacgttcagggacgtctttatacatcgaagaaattgataaatttatatacaaaggagtagaatatgttaaccccaatcattcttag

SEQ ID NO: 209 - DNA, 306 bp, Asteriusvirus sp.
  source 1..306: mol_type = genomic DNA
atggatatacaaacattcaataagctaaagtactatgataatggttttgcattaataattaacgaacttgatgggataccatacgaatatcataatcaattaatgaagatagtaaaatgtatatgtgaagaattaaaaagtatgtttaaaaatgaatatgtttatgatttaggtaatagtagcaaaaaactatacataaaaaaattctggggaacgcattgtggtttaatggttgatttaggtttaagtttagacgataattctgaatcatgttcattatatatagatgaaatgcgaatatcatga

SEQ ID NO: 210 - DNA, 297 bp, Asteriusvirus sp.
  source 1..297: mol_type = genomic DNA
atgaatataaaaaaattatttgaacaagtaaatttattgtactggtgttcagacggttcagataaggaatatagtgaagtttatttagaactgtttagaactgaaattcattatattcgaagatacttaattgataacaaaactaaagtacaagtaagataccataatggtactttaaaggatggtataattattggattgatagttgcacgatggtctagtaatattaaagttgcagtaagattaatgtctgatgatggtgtctacacaatagaagctagtgagattatatattaa

SEQ ID NO: 211 - DNA, 303 bp, Asteriusvirus sp.
  source 1..303: mol_type = genomic DNA
atgaatgaatattatcataatttattcgattacataaaactaatagatgatctttcttttgaatttctcagtactgaaaaagttcttgaacctctctattatgattgtattagttcactatctttagatgaaaaagagatattatcaaataatttaccgtcaaccatctgtgtaatcaatggttccaaggctgtggtgtctgaggttaattttcataaatcacttaatacaattgtttacaagttcgataacacttggtttaatcatgtaactagtaatattaaatctgtgagatttttatga

SEQ ID NO: 212 - DNA, 252 bp, Asteriusvirus sp.
  source 1..252: mol_type = genomic DNA
atgtttgagcaggacttagagatattcaaaagtcatattgattacttgactatattagaaaatgatttaactacaaagtacaaaggtattcgtgttctgtgctggtatgatgattgggattataaacgtgaactcactattgatcgaatttatttcagtgacggtgtactaaatgtacatggtgtaaatgattttggtcattcatatacatattctaataatgctaaatttaaaaggatctacaatgaatga

SEQ ID NO: 213 - DNA, 261 bp, Asteriusvirus sp.
  source 1..261: mol_type = genomic DNA
atggataaatttcacacagatataacacagataggtaatcttatcaatagtctaattactgatttagaagaaaagtatttaggtcgaaatgtatacgtagaaatgtatgaaacatatggtgttattgatatgatttattacagtgcattgaagtgtgaaatacgtttaacagtatgtttgtttgaaaaaaatacattcaacagaagtactgcaattcgccaagttggagttgatgatatagaattatacgaggaacaatga

SEQ ID NO: 214 - DNA, 123 bp, Asteriusvirus sp.
  source 1..123: mol_type = genomic DNA
atgttctatagattgtctttatacgaaaataaagataaaaaatataacttttctaaacaactaaacacaagtactaatgattatctattttcatcaatgttttatgtgagaggtttattataa

SEQ ID NO: 215 - DNA, 99 bp, Asteriusvirus sp.
  source 1..99: mol_type = genomic DNA
atgttggtccctttttcttttaaggtatattataatgaatgtaaaaacacagatgttgttacaaaaagaatacttagaaaatatagaaatgttctatag

SEQ ID NO: 216 - DNA, 933 bp, Asteriusvirus sp.
  source 1..933: mol_type = genomic DNA
atgccaactattacactaacagttggattacctgggtgtggaaaaaccacatgggcagttcaagaaattaaaaatgccaaatcgaagactatcaacattaaccgtgatgacattcgagaatcaatggcagggtcacatgatgcatacaaattcaacgacgctaatgagcagtacgtaactaaaatgcagttcagtgcagcaaattcagcagcagagaatggttggaacatcattgtgtccgatacgaaccttaaacaacatttccgtgatgaatggaaacgttgggctaaagataatgaatacgactacaaagaaaagaacttctacgaagattttgtaccgaatgaagatcgtggtgcagatgttcatgttttctttaagattaaagagttcgtaaaactttgtaagaaacgtaacctcatgcgtgagcgttcagtacaagataatatcattgacactatggcagatacgtactattatagtaaggccatgcacattggttactatggtaattcacgagaagctgctatcatcgttgatatcgatggaactcttgctcataaatgggggcgtaacccgttcgatgaaagtactgttcttcaggatacacctgatgaagaagttattttgtctattatcgctgaagcagtttttcataaacgcaagattatcgtcatgagtgggcgtactgaagggtgtcgtgctgataccgaacagtggcttaagaattggggtgttccttacgatgcattgtttatgcgagatatcgatgataaacgtcctgatgatgttgtaaaattcgacctgtacatgaaaaatgtggttgatcattacgatgttaaaaaggtatatgatgaccgagcacaagtcgtattcatgtggcgtaagctacttggcttgaaagtttttcaagttgcagaaggaaatttctaa

SEQ ID NO: 217 - DNA, 315 bp, Asteriusvirus sp.
  source 1..315: mol_type = genomic DNA
atgaataaagaacttgcatttgagaggatcgaaaagttaaagtacattgaaaaggaactaatagaatctgtcgaatcaatggtcgaagattacgttttcgattttaagaaaacattgattggatgtaaagttaaatgctgggatcatacaatcagagaatggttcagtactataattcttgatgttaaagtatcgcgtactgctattggtaatttagtaaatggtgaatgctttgtatacactgaatacaataacggaacaagaaacctttcaagaggatggcacaaactcgaagatgtagaattcattgagtaa

SEQ ID NO: 218 - DNA, 255 bp, Asteriusvirus sp.
  source 1..255: mol_type = genomic DNA
atgagcacagtaagtgacctaaaatactacaacaaaactgcggatacgtttattactcatttatatgaagaatttagtcgtatccgtaaggaatatacaggtaaatgtattttatatagttcttatcatagtggtggaattgaaagtgcttacattactaaagtgaagttttctgatgactatcaattactctttgaattagatgattgtttcgttattgaagcttgtttgatagtggatgttctagataattga

SEQ ID NO: 219 - DNA, 231 bp, Asteriusvirus sp.
  source 1..231: mol_type = genomic DNA
atgaaagttgaagttcagcatagtattgttcaggatatgtcagtagttaaatttctttctctgaaagattacttcagatgtatcaagttcctagaagaatctcaattacagtggaccccattaaagtacagttcatccaatgatacagctagtattcgttgtgatgaatctgtacttgtgaaaatctccaagcgatttggagtaggaaaagttaatgagcacagtaagtga

SEQ ID NO: 220 - DNA, 255 bp, Asteriusvirus sp.
  source 1..255: mol_type = genomic DNA
atggctaaacctaagtataaaaatgacggttccctttctccgactgagttcaggaaaatacaagaagaaatcgatgaattacagcacaaacgctcaatgaaaggtgtgaagataagtaagaaacgaatcgagaataccttcggatgtagtagtactgaatacaagaagaaaaggaaaccaaaaggtgttaagccgagaatacatgatgtaactcgctatacatcgaaacgtgaaaataaatttgatccactataa

SEQ ID NO: 221 - DNA, 1143 bp, Asteriusvirus sp.
  source 1..1143: mol_type = genomic DNA
atgacccttttacaaatatatgaagatttaatgcacttatgtaatacaaacgatgcgtttttttatgtggatcataaaagtcctgctggtggtacgtatcgtgtattcagttatcgtctagcatcatacactgatttcatgcaaccaaatgcgttggaaacccgtggctctatgtgggaaattgatgaagaaggtgacatgatacgttgtgcagcacgtacaatgaaaaagttcttcaatgcttacgagaatcctgctacaatgttccctgctaacaccacatgcgatgacattgcggtagttatgcctaagttggatggttcgatcatcagtacttatcgtgataatgatggtgagattcgttgtaaatcacatactgcattgtattctgaccatgcgattaacagtactcgacttattaacgagaaccagaatttgtatcagtacatcgacgaagcggaacgtttaggttacacagttaatatggagtatacaagtccagagtaccgaattgtattaccatatcaggtagaacaactgtttgtactgaacgttcgacatcgtgtgagtggtgagttgctatgtggtaaagcactacgtgataagtttccatgccttgcacagtacagtactaatatgaccggaaaagatattcatcacacttttccggtacgaaataccttccgtgaaagcgtggaggaagttcataaaatgcttgatattgagggttttgtgtgcatcctaaataatgggacaatgtgtaaaataaagactgactggtacagttcattacatcttacaaaagatagtattattattgattctcatttatatgaagcagtattaaatggttcaagtgatgatttaaaacaattgttcagtactgatgaatatgctatgcaaaagatattaagaatggaacaattggtattttcgtgctataatgcattacaagatgaagtggaaagcttcgtcaaggaacacaagcacttggagcgaaaggaattcgcaatgaaggttcaggagtgtttaactaatgaactgaatcgtcagggcttggcctttgcaatgtataacaataagaaagttgattacaaagagactcttataaaatacatgaaaattgtactaaaggatttttag

SEQ ID NO: 222 - DNA, 309 bp, Asteriusvirus sp.
  source 1..309: mol_type = genomic DNA
atgaatctttttctaatggtcgtgataccagttggtggaaataatatgaatatccaagatagattacaattactgtacactattgaacaggctgcttttgaacttgttcgaaaaatatcagatgaactacctaaaggaactaaagttcgtgtacgtgagatgaattatttttctggagtaattgaagaacaagtactaacagtgaataaagtaacatactatgaatctgagttgtctattcagtgtgaatcggatgatggattaatatcatattatggaactgatgtagatatagaggtaataaaatga

SEQ ID NO: 223 - DNA, 690 bp, Asteriusvirus sp.
  source 1..690: mol_type = genomic DNA
ttgattaaagatttagatagaattttatatgtactaaggggtgtaattacattacatccacaaatcaatcgaattgaaagtacatttcagttggagtcaagagaaactccatattcacatatatcaaatgtagttggttcactcagtactgaagactcgtcttacgatatttgtgtatgtgaagttcaaccaagttcggatcttggatttgctatttttgataaagaacaaaatctcattagtatgtttcagtgcaataatcctttttggaaaacatgcctgtatccagagtgggctatgcttgatccaaccaagagtaccattaaagtttatgactctaaaaatgatgaagtcgctattgatttggatgagtcaatgtcagaggaagaacactttcagctaatgatgatgcgtgctatgcctgagtacaatgcaatgattaacactgtgcaatacattaaggatactatgccatcattgcgtacacatgagttttgtcatcctgtattgtatgaacatttggatttagatttcagtactattaaattcaaagatagtattataaaatatattcaagaaaatgttaaatttaatttcattagtactatgaacaataatccaaaaacgaattttaggcatcagtacaatgaatctttttctaatggtcgtgataccagttggtggaaataa

SEQ ID NO: 224 - DNA, 579 bp, Asteriusvirus sp.
  source 1..579: mol_type = genomic DNA
atgaatgtattagaattaagtactaagctgattactatgcgtaacgagtggtacgattggttttataatggtactgatatggatttttcaaaatatccatttatggaatcaggatgtgatgcaagataccgctggttgagcaaagattgttctggtttacatattctagttgacgatagtggtcagggaattataaaagatttacttcaagttgaacaactcgtccatgataattggtgtgataacgatccataccttggaaatatgatttatgtaagtgaagatgattgcatattcgttatccagcgtcatggtaattctatgttttatgtagcagacagcagtactccagaaggtgcagcagccgatggtcttatgcctaagattgatatattggaatttggattacctgagcacttccagattagtactttatacgatattccaccacttgagttctttgaagaatttaaattgtactacaatgatcttcaaaaattgagtactgagagtcgccttgaaataaccgtcaagtacatggacggaacgaaattaaccgatacggggatagaattttga

SEQ ID NO: 225 - DNA, 303 bp, Asteriusvirus sp.
  source 1..303: mol_type = genomic DNA
atgttcagtatagatttaattaacagtactatcaaaatgttggcagatttggtgagacaatccaatggaactttatattctgcaatgtataaaatgtttgaccgatatatcaaggattgtaacatatcattatatggacttgctgttgatatagacgattactatggaattaatacttcatataaaacaggaattttaattggtattaatataaagatggggtatttcccttattactgtataggattaccagataatactttggtagaatatccagccagtactattaaattaagaggataa

SEQ ID NO: 226 - DNA, 282 bp, Asteriusvirus sp.
  source 1..282: mol_type = genomic DNA
atggatttttatctacacacatggacatacgaacaatatattacattatatcttgaaattattaacacagaacctaggtgtggttgttggttcgcagatatcataaaagagtatgcggacgaatttgagttcgtgtatcttggtactgatatatttgtaaaaagtgtaggtaaaaccggacgaatcactgatatagattacgacactgttagtgtgaatttctatgttgattttcctgatgctggcgttgatggtgtatattgtctttatgaaataatttaa

SEQ ID NO: 227 - DNA, 729 bp, Asteriusvirus sp.
  source 1..729: mol_type = genomic DNA
atgcttgaccgtatccgtttcgctacagagatggcgaatgaattaaacatggcaaatttccaaatgttaacatcagtaatggctgaacatgcatgtgcttattctgtaagtggtgtgcagtgtggtcaggagaatatgttagcagatgtttatagtgaagtacaaagtaagcaatatagtgtaaagacatataaggataagtttgttagtctttatatgaacgaagatattaccgaagaccgcaaattcactgattttattattgaacgccgagtatcaggtgtatctaatcctaatgcatcaagcgatgaagtttttgcagaagtactgaaagatatatacgaaaatgaattaaaaagtaagaatcattacaatgtacgtgaaactaacacagtgctcttgggatatgatgaagacgaagaatactattattttcgtatgactgaagttccttttgaatacaaatctccatatacaactacagtgaaagaatttactgaaaaaagtaaaaactttatgaagcatgaaggaaatcgttgtagtataaatggttatgacgaaaatggcattcacatttatgaatgggttcacccaaattgtcagacatacactcgttgcttgaaaaaacgttataatttagaagagcatgaatcattctattttaaagttaagaagcaaggttatactcgccccgccgattctgaattgatgggtatggtatatttctaa

SEQ ID NO: 228 - DNA, 285 bp, Asteriusvirus sp.
  source 1..285: mol_type = genomic DNA
atgacaaatacaacaaatgaagttcttattgctgaaacaatgaagatgatttactttattactacggcacaggatttgtcttatccagtaaaatcgttacttaggtcaatgtatcttgatattgtaaaagaatattataaatctaaacacagaagcattattagtgtttatcgtgattatgaaaggattcgtattttattctggaacaagaatcgagtacgttctgaatgtgatctagtagattttaaattagagaatctttattgctataaacagggacaatag

SEQ ID NO: 229 - DNA, 183 bp, Asteriusvirus sp.
  source 1..183: mol_type = genomic DNA
atgagaacagtattttttatctggagtcttttttcattggcagtactgacagtttcaggtgcttattcatttttaacaatgaacacatggtatgttaatttactattcccaattgttggtgttggtttaggatttactttacatagtgtatgtaaggattacaatgacaaatacaacaaatga

SEQ ID NO: 230 - DNA, 291 bp, Asteriusvirus sp.
  source 1..291: mol_type = genomic DNA
atgaatatcattttaatgcagaaaacatatgctatattggtgaaagattattccattactttcgattcacaagaaagtgctctacataatctatacaaaaacgtaacacaagaatacagaaatattttttctgacttagtagtaggaaggtatttcagtactagaaaatacccaaaacttcaaatagttgatgtttctttttatttcaatggtcatattactattcatagtttagaccaagattcaacaacgtacttaaacttttcatttgatgaggtaacatttttatga

SEQ ID NO: 231 - DNA, 264 bp, Asteriusvirus sp.
  source 1..264: mol_type = genomic DNA
atgactaaagctgaactaatagttcatacatataaaatgatatcaagtactgagttatcatatagtgcagataatccagtactggattattttgttgaattattgaaagagcattatattggtaaatcactgattcttaataatattaatttcacggtaaaggatgtagcacctggaaaaaacgtactaatagtatgtgttacttcatctgataacccagtatacccaatatcaatattttttgagatattaggagatttatga

SEQ ID NO: 232 - DNA, 201 bp, Asteriusvirus sp.
  source 1..201: mol_type = genomic DNA
ttgaataaatgtccatattgtaacagtactcaattagctcgtttccgtttagattcagactgggcgactggtgctggtgatttcttccctattaatgatgatgcagaatacaccgaagaacagcacaaagattttgataaatcatggcgacctgacattgagtgcatttattgccttaattgtgagcgtgttcatgactaa

SEQ ID NO: 233 - DNA, 285 bp, Asteriusvirus sp.
  source 1..285: mol_type = genomic DNA
atgaaaaacaacttaaaggaaatacaagtattttataaattcttatacttgtcatatgtaaaagatgagtactatgaaagtgtgtattattttttatggcaacattaccgtactatagtaagagatttatatataggaaaatctatcatatccaatggtgaaaaatgtatatgtactgatgttgttagttttaatggttctttaacactgtgtttcagatgcgataataatagtgggtcattttcattaaacgtatatcagttagaaggaataaattttgaataa

SEQ ID NO: 234 - DNA, 312 bp, Asteriusvirus sp.
  source 1..312: mol_type = genomic DNA
atgttattaaatgatatacaattcacatacaaatttttgtatatccaatacgctacggttgatgctggagaatatctctacggtgaaatctatcgttcggtatggataaagtttttggatgaattacatgaatattaccatgatttgtgtatagttcgtgataataaaatatacaaattccgcgatattgttagtcatagcggtaagctacgattggaattaagtactgatagtgatgttgattggattggtgtaaatttactggagttggagaatgaaaaacaacttaaaggaaatacaagtattttataa

SEQ ID NO: 235 - DNA, 312 bp, Asteriusvirus sp.
  source 1..312: mol_type = genomic DNA
ttgggattaaatttaaatgatatacaattcacttataagatcctatatgatttgtatgatgtataccttgttagtaacaaaataggttcacataacccatacaaagaacaaccatttattgatttatatattgagtacttagattcagtaggtgaatatataaaaaagaattacagtacttttatcgatggaaatgatatattcgagttctctggagttaaatcatacaatgggattatccatgttgaatttcttgaaataaccgataggggatttatcgagattaaagttgtgaagttggtgaatttataa

SEQ ID NO: 236 - DNA, 90 bp, Asteriusvirus sp.
  source 1..90: mol_type = genomic DNA
gtgatggtaaagttgaggttcagtactacactgattttggatttaccagtattccgttggagatattcccttgggattaaatttaaatga

SEQ ID NO: 237 - DNA, 150 bp, Asteriusvirus sp.
  source 1..150: mol_type = genomic DNA
atgaattataaagatttcctactaacatacaagattattcgagatttagcacacgacaatgatagccctagtctagaagacacatgcactgaaatgattcatacgattcgtggtaagattaaaaaaattcagtactgttattattggtga

SEQ ID NO: 238 - DNA, 276 bp, Asteriusvirus sp.
  source 1..276: mol_type = genomic DNA
atgaattataaagttctacaatatacatacagtgttttgtttgatttacatcataatggcagaaataccaacacagttcgagaagactcattcacatttaaaatatggattgaatacttagagatgatacgtgcatactttattaacactgaaatagttattcatggtaaaaaacagaaggtactacatgttaatagttatggtggtagattaaaactatcatatttcaataataatataaatgaaatatattctattgatttggcagatttatga

SEQ ID NO: 239 - DNA, 687 bp, Asteriusvirus sp.
  source 1..687: mol_type = genomic DNA
atgtctataaagggatggttatcttttttgacaataacagcaactacttttatattgttaaggagcattacgttgacaaatacaaatactaatacatacttccgttatcttcgcttaggtctttccctacgtccgatccgtggaaagtgcgattcactcgctgaccttgactatgcatatgcattacatcatgaaggtgtacagtatgtattgggtgattatggtgaatttgaagaaacaaatgacagtactggaattaatgctggtgtagaaaatcttaacaacattgctaacagttctcgccatgacattgtgttacagattcaaaactttattgagcagcacacaggtaaacgtgtttggtgctatgtcggtactgatgcacaaatgtcaatttcattcggtaacgatgaaggatatgttgcacagcttattatggattttgaatctgaagagaagtttttagaattcaaagaaaagattattcagtcacttgttgatatgggtatccccgaagataaaatgccagaagttcaaaacattgatgaatttgttttgattccatctgatgagaaatatgatgcaatgtttactgcccttaatattccaggagttattgtggagtactttgatgatggtgatgatagtatctatatcgatctagatgacgatgacgacgatgaataa

SEQ ID NO: 240 - DNA, 90 bp, Asteriusvirus sp.
  source 1..90: mol_type = genomic DNA
gtgaaaaattttcagtactggatggtatcgaaatgtggcatgtcaaaccactgttccacactttcagtaaagagcacaaaatgttattga

SEQ ID NO: 241 - DNA, 294 bp, Asteriusvirus sp.
  source 1..294: mol_type = genomic DNA
atgtcagtactgttcaaaaccaatccagtactttgggatcaaaatgagcaatcaggatttcgttccatccatgttgaatacaaaggtaatactgtagttgcaattattgctaacaaaactctaggaaactggactgcacaggttgttcctatgggatattcttacacatctgatgaggtacaattcctggctgaactatatcgccaagtgccgtttatcattaatgtactagaaggtaatgatacattatcacatgcagatgtgattaattttcttggaaacttgcatgtgtga

SEQ ID NO: 242 - DNA, 534 bp, Asteriusvirus sp.
  source 1..534: mol_type = genomic DNA
atgaaggaaacatgtatattatcatttatgagatgtaacccaatacatcacggacatggtttagtgtttgaaaaagctcaagcactacaagaacagtacaatgctgatttaaaaatatatctaagcaccagtactgacaatataaaaaacccactcccacctgaactaaaaatgtattatacagagggattctatccttcagtgcaagagaacatctacacagaagacaatctatttgatataatgagagaactggatggaaagtacttagatgttcttttcatttgtggttctgaccgtattgattcttttcaaaaaactcttgacatgtacaatggtaagttgtataatttttgtagtataaaagcaattcaggcaggtattgaccgtaatgtaagtcaatatagctcaacacaaatgcgtaacttcgcaaaaaatgaagattttgatagttttcgtgagtttttacctggaaatgacgaggacttaaaaatacaattatttgaagacgttataaaatacatgaggaaataa

SEQ ID NO: 243 - DNA, 786 bp, Asteriusvirus sp.
  source 1..786: mol_type = genomic DNA
atgacaaaatacattgatatcaacacagtttctatgataggaaaaccaccaaatgctctacacccacgtgtttatgctagtagaataaatgataaactaaaagcacctaagctatcaaatattaaatttaatggctttgttggtgaatggaagggacacggaacttattgtgaaatggaatgttctgaacatgggacatggcaatgcacaattggtaactttacgcaccaaactgttggttgtccaacatgtgttggatgtaaaaaccatacaaataaatcaatttgcgaaagtgtgaaaacaattatcacaaatgattcagaacgtaatatgtatatctttcatggtatacataagtttgctggtaaagattcaatattatcattagaatgcccaacacatggtatatggaatactacaagttataataattttaaagttcatggttatggttgtcctaaatgttcaagttatcatttgaagcatgatgttaaatctgacaataaactgtatttttatatattgaaatcagatgaccatttcaaaataggagtctctaaagatattactcgtagaaaatatgacattgaaaatacgtctaaacgaaaatatgagttatatctacatgaatacattggatacactaatgaaattgaaaagtatattaaaagtatgggttatcatacttttttcacaaaagaagaatatggagatgggtatacagaaactgtggcaattgataagctggatgaagttgtgaaaattgtaagggagtatcttcgatga

SEQ ID NO: 244 - DNA, 522 bp, Asteriusvirus sp.
  source 1..522: mol_type = genomic DNA
atgtcgaagaaggatgcttcgaaaaaacattcagtacatttcagtactggaaaagataactggactactccaaaggatttctttgaagatttggatgaactctgggaatttacactagatgcagcgtgtgtcaaagaaactgcattgtgtgataagttctttacaccagaagacaattcacttgaacaggactggggaaacaatatcgtgtggctcaacccaccgtacagtgatttgaaaacgtggttatctaaggcagttgatgcatataacaaaggtgctacagtactgattctcgtaccatcaagaactgatactatagcctttcaggattatgctgcgaaagtttgtgattgtatttgttttataaaaggtcgcttaaagttcggtatccctgaagaaccagataaaaagactgacagtgctccattccctagttgtttaatagtactggataagtatttgactccagctaaaatcaactatcttaaatctattggtcaggtgatgaagaatatatga

SEQ ID NO: 245 - DNA, 543 bp, Asteriusvirus sp.
  source 1..543: mol_type = genomic DNA
atggcatttattagaaaagaaaaaactgttacttataaaactttgaattttgatgattgcattaatcaatcacaagacgaagatatctttactggatatgtggttattaaagaaaaaggatgcatttcttatataaaggaattacaaaatggaattgaagtgacttcagttaaattacttcctactcaaaaaccaacaatatcaaaagcccagtatggtaattattttgaagaaagatatagtaataattcaataagtgttaaggctcatattattaaaggagaactagaaggagaatatagaaaatacaacccacaaggaaaatgtgtttgggttaaatacttcaattcaggatatgatgtaacatctgaaattatagagttcttgggtttaaaatgtacccctgagactattcatgattacaagttcaatactgaagaagagtttaatctgatgatgcgttacggttcacattttaaatttttatatgaatataacattgacagtagtacttttgataagatagtacacaactgtctctaa

SEQ ID NO: 246 - DNA, 99 bp, Asteriusvirus sp.
  source 1..99: mol_type = genomic DNA
atggaaacatcaatgaatatacgtgacgttgattgcatcaacatcagtagaattatcatgctacgcatgtctaattctacaagtactattttcttttaa

SEQ ID NO: 247 - DNA, 171 bp, Asteriusvirus sp.
  source 1..171: mol_type = genomic DNA
ttgagcatatttcatccccccgcaggggaaagaacaaaaaaatttgacgctggtggccttcacatagttcatatcacgaattctcttacgagacgaaagcgggttgctctgtttctctctatcgcggttcttgtagcaacggtcgtcggtcttaaacatcccgacacataa

SEQ ID NO: 248 - DNA, 90 bp, Asteriusvirus sp.
  source 1..90: mol_type = genomic DNA
ttgtatttgatttcacaaaatttggacgcaactatattgtataattccgaccgcatatttcttatgaaatctcccttagataattggtaa

SEQ ID NO: 249 - DNA, 93 bp, Asteriusvirus sp.
  source 1..93: mol_type = genomic DNA
gtggttcaaactatgccatcatctaacgggtttcatctgctgttcgtactgaaaggactactcatctaccctctacattttcgagtggattag

SEQ ID NO: 250 - DNA, 855 bp, Asteriusvirus sp.
  source 1..855: mol_type = genomic DNA
atgaaactttatctaatcgttgactacaataaggattatgctggtaacttcaccgaagattcggatggatattgcacatcgactaatgtcaatgtacgtagcagtagtgctcatgagcatgaatcttgtaaaaatctaaaagattttatcgcataccgagcatttgaaaagaacttctgccgcagtagatattcgaagtttgagtacccgttaattgatgttcctgatgatttaatgttccagttaatgctgactggagttcaagattatgattacatagcgtataatcatattactaagaaaatttatattggtacatcatcacatgacacttctatgtatgcatcatgcccagatgatcgaatgaatgatagaaaatcatactatagtgggtcagttggtttaaatgattcattaaataaaaattcattctttgagtatgtttatgattaccatcatgagaaaaaagaacgtgaagattactgtatagcaattgatagtactaatggttatgaagacgtgaaagaagcacttatgccgtacattattgaaaagtactacaaagattttcagtactgtagtaattttctaatcagaaattctattataatcggtcgccaatctagtgcatactctcagtactacaacgattcaccagtagcatcggcaaatgaaatgtgtgatattttacaaattccacgtgaagatatgacatttatttttacgtcttttattgaagatgatgagttgtatattaaaaataaacatcgtttcatgccaagcaggattgaggttattcgaagttttagtgttgatatactaacaaatttcacagaaaaaaccgaatataactga

SEQ ID NO: 251 - DNA, 306 bp, Asteriusvirus sp.
  source 1..306: mol_type = genomic DNA
atggaagacaatggaatgaaatttgatatgtttgaaggtgtaccagagttcgatttcaacaaacttgaagaaggtgaggaatcagaactagttagtgttacacttaaagcagattctaaaaagaaatattcatcatcagtacgttcacgttcacaagaagaatacgaaacatttattgaaagtattcattatgaaacattccatcacgcagatggaactccatatgaagtacgtgtaacagtactgaagcctgaagtaaatccaatggaaaatctacgtcctgtttactgctgggcaagtcactaa

SEQ ID NO: 252 - DNA, 387 bp, Asteriusvirus sp.
  source 1..387: mol_type = genomic DNA
atgaatacaagttcagtcctaaaagcaattggtggtgttttactcattgaagtaaaaggtgagccaaagctatgctgtttagaagatatgaagaatacaaaacacttcagtactggtcagattttcaatgccattcgtattctaaatgacaaatccattgctgattatggaaaagtttggcctgtatatcaaaatgctgatggtgatatcagtactgattggaaaacaattgaggcggtacgacaaagttgtgagagtgattgggacttcattgttgaagtttgtgatcaactacaagaagatgttccagaaattgttgaacgaaaagaagttctagcacgacttgaaaaattccgtcacggaacactacagtatgacacaatctaa

SEQ ID NO: 253 - DNA, 294 bp, Asteriusvirus sp.
  source 1..294: mol_type = genomic DNA
atggatactaaattcaaaattatttttaaaactaagccgtatattccacatacagcagaacgttttataccacatggtgctgaggaaattattcaccaagatggtactaagttataccttgttccttgttcttatgaacgtgcagtagaaatgttactaatgaatgctagactatgcaaaaacaagtacattagttacctatacaatgaacatattttagatttcaatgatgaaaatatgttcattctagcaattgaggattttgataactggtacaatattattaaaatctaa

SEQ ID NO: 254 - DNA, 849 bp, Asteriusvirus sp.
  source 1..849: mol_type = genomic DNA
atgttagacatttcagattttcttaattttaaaaaatattcagtacttgaacatatcaacgaatttctgaattctactacaccatttggtatcagtacatcagatgcatacgatggatatacaatcttcccatacaatgactttcaaatttccgtcaaaaaaggttttacaaaagaagttgcaattcgtgatgtagtaatgtatagcgattcttctatttcttactgtcatgacgtgaacaagtttgaatctctttcaacacctaattgttcatactacaaatcccatgacacgatgatgtataaagaacaacatattaatggtgtttcgttctataaaactagcagtgataaatcatatacatctagagatgattttggaaaatacacatgtactatgcacacggataatgaaaaaacaaattacactcattcattcgagtccaaattccaagagagtgaagtttcaaatatcactatacaagaacaggtttcagaaggcattgtatatcgtagtactgcattctttcgcatgaaagatattgccacaggcagaccaatgatgtacaatattgacatatacatgaaaggtgatatatccgaagtagtgattagtactggttatcgtgaaaaatatacagttacaatggaatcaccagatgcatcattagttcacctctttaacaatttatatacattccaattcgaacttagtttcgatccaaatgaatatcaaatatttgatatattaaaaagtaatattattaataagttagaatattactacaagttaggtggtaagatgtgcatagttaatactatgttacataacataaaagaaacattataa

SEQ ID NO: 255 - DNA, 132 bp, Asteriusvirus sp.
  source 1..132: mol_type = genomic DNA
atggctaagaaagtaaacaatttcgtacagaaacacatgaatgagtttaacaagcctcagacacatgtggatcgtaaaaaagaaatgaaaaatggtaaagtaaaacacaagtcgagatttattctcgactaa

SEQ ID NO: 256 - DNA, 474 bp, Asteriusvirus sp.
  source 1..474: mol_type = genomic DNA
atggagattaaaactgttgaaaatgggaaaattgatgacattttagagttggacgcattcaaagttcatgatataatgtttaatgtgaaggacattattcaatgtctatttttgtgtagcaagacaatgcatgatttttttcacaacccaaatactaacgtttttatactaacaatcagtactgaaaactcgtttatcatgggtatgcctatgagtacaaatgaacaatatattgattgtgttattcgtaataacgatagtattacgccacaatctgaagtacgtaaaaagaaaaacacctacacaatcaaagatgataaaattatgatgtgctgtagtaaagggtttatattagataattttatcgtcaaagacagttatcacgactttaaagtgtctgaaaatcaatccaatgtagttctttatgcgagtgacatagaaagtctaacagttaaagatcccagtttggagtaa

SEQ ID NO: 257 - DNA, 498 bp, Asteriusvirus sp.
  source 1..498: mol_type = genomic DNA
atgtatctaactaaatcaatgaaaaattcatttgataaaatcaagagttgtcttgatggggaaaatattacaagtgttacacaaactgctgaccaaattcaaagcagttcaagtgattgtactgttattttaggtttacatagtctacgattatcaatagtaaataatattgacaacactgctattgtaatcacaccatgccatattcaaaatgagaatggtgtatatcttcatcacatgggaacagtatttcatattttcaatacaaacgaaaacattgttaaggaatacaaatctcttaatattgattcaggtgaattatttcaaatgagtactttgtactcatgtaatttcacagatacttcatgcattttgccatttttcttggaaattattaagaaaatggaaaatttaaaacgtgaatacaataaagaaatggttcctgaagctatattaaatattactaatgctatagagaagtataatgcagtgacttaa

SEQ ID NO: 258 - DNA, 414 bp, Asteriusvirus sp.
  source 1..414: mol_type = genomic DNA
atgcatttgagcaatttagagaagaaagaaacaaggttaacaaccacagatgaactaatagaggcgatcactaaggagtcaaaataccacaaagggattcgtctatattttatagatattggttcaatggaaggcatatacatttatggttcacaatctttatcttatgatgtaatgccaaaaaaacatgtaaaaatctttttaggttcagataaaaaaactttcttgacaattaatgataaaaacgttattatgaattcgttgggtcatgataaggtggaaattgatctaaacacactggaggatattgatttttttcaatacgagtgtttaggtgttgacttacatggcattagtagcgatatgataaaatcattaatcaaatatttcgaaggtgttcataaatgtatctaa

SEQ ID NO: 259 - DNA, 474 bp, Asteriusvirus sp.
  source 1..474: mol_type = genomic DNA
atgttagatattttaggaaacatcgatactgcaaattattttatccaggacgcactgttcaatacagttcaacatggattagaagttcgtcataacgtttaccaaggtgatggttatttcgttgatattgttgaggcacgaaagaatacgtttaatgttaacattacaacactgggtagacagaacattgcacgaattttagtaagtaaagatgaaattgtattgagatacagtgctaagtttatgttgacttataagaaaaaaactgatatgttcagtactaatttatttgatgagccatttgaccttgaagatattgaagctactttctttactcaaagtactatggtaaaatacactgatgttcaattttctgctgatgtaatgtcagaaacattacaaatgatcaaggtattattttatgcatttgagcaatttagagaagaaagaaacaaggttaacaaccacagatga

SEQ ID NO: 260 - DNA, 537 bp, Asteriusvirus sp.
  source 1..537: mol_type = genomic DNA
atgactgacccgatggtagcactggcacgtactaagttactattaaagattggtgagatttttacggttcttctgtccaataatattgatattactgagctagatattaagcaaccgtgggaagtgactatgttctcggcgttccaccgattgtcatataaaggtgaaagtgttcttgattttaaccctaaagcaaaattcatagattatgctgcgttgtacagagagttgcaccgaaatatttattccggttgtataaccaataacttcaaagaaattaaagttcaaactgcatcacatgagttcaatgatttactttatccagaatttaatctaactgaagaattactctttcagtactcgttaattctaacaaatctcgaaacactagagttctacaaagagttagtagatatttttatgaatacacgactttcaaaagatattgtgatattctggtatacagagcatgttacggaggaattgcttactgaatttcttctaaatatgacagctataaaggagaagttatgttag

SEQ ID NO: 261 - DNA, 414 bp, Asteriusvirus sp.
  source 1..414: mol_type = genomic DNA
atgaaactgtatcatgcgagtactgtaaaaattgataacttttatatcccgtatggtggtcttcatatgggaggtaaacacagtgctttggaagctgcattacgcaagctgagaagcccactgaacgtagtagacgcatgtacagtatacttgcataccttagaagttgatgttgataacgtgcttctgtgtgaagatttaggcagtgatgatgagtggcgttcacttattgagaattgcactgctcaaggttatgatgctgttcagtacaaaaatgactacgagcctgataatgttcctagttatatgatttgggatgcatctaaagttcgcatcattgaagttgatgctatgcatatggatgaagctgaaatgattatcgaagattttcttgatgaatatgaaggtgtataa

SEQ ID NO: 262 - DNA, 585 bp, Asteriusvirus sp.
  source 1..585: mol_type = genomic DNA
atggactttaaagaaattgaaagtaaattaaagtacttcaaagatatcaaacttctttggaaaaagtataaagttgattacaatttcagtgatgatgagacaataaaatacattgagattaatatcaaaatcaagttcaagaataataattatggtgaagtaaccttaaatcatactggtatatcactcaaggactatgatggtacaacactcgcatattttgacttcacaccagaaccaggtgaaacactacttagtgagataaattcctatgacatggaagtgttcggcgggaatccgttactgttccgactttctgaagagtggagtgaagagtactacacttacaaagatggtgtagtacttgacattcatggagaagttgttaatgacttggaagaacgtttgttccaagaattgtgtgtttcaaatacttcatatgcatacaatcatatccttgacatgtttgatttatatagtaaaatagatgctgaaatgaaggcacatggtattcattaccttacaattaacgactatgctcaactcgaaaccgctgtgaaagcattgactaaagtactgaaatag

SEQ ID NO: 263 - DNA, 603 bp, Asteriusvirus sp.
  source 1..603: mol_type = genomic DNA
atgagaaaaagttatcaagaagctattgacttaattcgtgaagttatcaaggtggctcctgctgctattgagttcaagaagtccatatacaagaagtatggttcaatgtcgagtatgtgctttcaaaagaaacgtagagcattcactacccagtactggaatgattctatcatcctgagcaatgagactcagcgtattttaacactagaatctgaacctaatgagtacggggaagggaacatttgtgtacctgattatgatgaaattaacttcaactgcggtgattttgaaacaacattattacttcatgagggttatccagaaggtgatgtattagctgagtacaatccaaaaactaaaattctcaaaagaggaatccagttcactattaataacaaagatgatgttcaagcagcactgatgcaactgagtacaagtgaacctatcactattagtgtagaagagttatggggaattatttcagtactcaatgagtgctacaaagtaaaatcattgcgtaaacacagcattatattacataccaatatggcaaatataaaatgtaagcacattcaagaaatggtggttccagatggactttaa

SEQ ID NO: 264 - DNA, 552 bp, Asteriusvirus sp.
  source 1..552: mol_type = genomic DNA
atgaactacaatcatgatctttttacattatgtgcatccaaatgtgttgatggatggacagataaaatcaataccataattcatcgatatctggtctttagttctcgtgcacgaagtgagggggctatggatttcaaatatacactatctattgatggtgtaactatccatgcagacgaagaacgtctgagcattaatttgtatgattcctgtgtatttgctattcaccaaaagatggggaaaggatggggttgtaataacattaactcaaaagctatcttttgggttggtcaccaccagacagtacttgatccttcaatcaaatctaatcttttatccgataatatggtttatgatttattgtactccgaagaacaacattttcagttaagtacattacatgatctggcacagtacgaggattgttacaaaacattagaactatgccattcccttgaacttaaagataaattgatacaagtttacccttcattctttcatgaagaagtacaaagtacactagatcatattttatatggatacgataaatga

SEQ ID NO: 265 - DNA, 582 bp, Asteriusvirus sp.
  source 1..582: mol_type = genomic DNA
atgaaaataacaaatgattttattaaaagtgtagtacaccctatgcttagtattatgaaaaaaatacagaatctaccggaagataacgattacaagtttaatcgttttgattcagatgtgttttgtattgaaattgaaattaataacaatcgcgatttacatttaaaattcaaagaatcgtcaagtccgtactacaactttgatatgaattttaaaatagatactgacattgaagaaaacgtaatatcaaatcatactagcaaaaatggttttatgcatagaactactatgtacaataataaaaatagtattatatctaaatggaatcatcaattcactaaaatttgtgaaattgaatatagtgattttggtgaagagaattactttcagttaagtacaattcatgaacttccaccgtatgattatgttaaaacatggtttgatattcataatataattgatgatgcaatcaaacttccttttggtgtgtcaatatcatatactgctcctaaaacatttgtttttactgaagatatgattatgaaaaagatatgggcaattatcccacttatgatggattaa

SEQ ID NO: 266 - DNA, 510 bp, Asteriusvirus sp.
  source 1..510: mol_type = genomic DNA
atgagtttattaaatgcacgcgaattagttgagatgtatgagattttgtcttcatataaaaattctcatggagatgtgattctcgacaaaaagttccatgtcagtgttgaacatatatcaaatatagatatgatttctttggtggaaagtaataagtcaggtcttgaacgcgatatcatgcgtttgatttatattcccaaaccatcatatactaatgatagttcaattagtaatgagacattcatgtatagtcctggtacggattctactatagtatcgctgtccaataaatcaatgggtactttccaattcatctataccagtactgataacattgaagaaattgaatttcaaaacaatacattaagtccatgtagtagtgttataacctttatgtcatatctatggtcaactaaaacaagtgctgttgtatatagttcaaattatacacaagatagtattgttgaatcatataaagttctaaaggaatactatgaaaataacaaatga

SEQ ID NO: 267 - DNA, 297 bp, Asteriusvirus sp.
  source 1..297: mol_type = genomic DNA
gtgactatttgggattcaccgagggcatcagcatctactctattggacaatgaatgcattgattgcattaattccacttttcatctctacggtactacatttttcggtacatttctggatattgaaagtaaagatgatattgattcacttgcgttacaataccaagtactgtataatactaaattaatttacgatttagtactagcttcttatgtgtataaattaatgatgaaatataatcatatttctgtttcagtttatactaaggatattctttcattaagagacaaaacatga

SEQ ID NO: 268 - DNA, 105 bp, Asteriusvirus sp.
  source 1..105: mol_type = genomic DNA
atgacaagagatgattgtttgtacatatgggatataattgaaactacactttcaaatccagaaaattataaaacaaaaaaagacaacgacacaaaatatggatag

SEQ ID NO: 269 - DNA, 582 bp, Asteriusvirus sp.
  source 1..582: mol_type = genomic DNA
atgaacgcttatagttatatgacagaacgccatcagttattatatgatatcagtaaaaaaatgctatcaattgttggtagtgcgaaagaaattgaaaaacaatatctcatccgtgatgtatcaatttcatccaaatgttggtcaaatgaatattacgaccacggtattcttactatttctggggccagaaatatttgtattgtaaaaaataaaagtaaaagtaatgaagagtgtgagattagaaccgatatacaaattaaggatgatggaagtttttcacatcacccattccatattagtactattggtgttttatataatattaaagtactattcggtgatgaagagtatgtgttaaaagctatcaatccagattcaagtacagttgaagaagaactgttccagatgagcactgttatacctgaagaggttcttagtactattattttttgtagtttaatttatcatgaatacaaaaagaaccagttcgatttccacatgttaggaacgtacatcttcaataatttgaatgtagatcgtttaaaagcattaaatgcagcaatggataaggtgctacaatga

SEQ ID NO: 270 - DNA, 585 bp, Asteriusvirus sp.
  source 1..585: mol_type = genomic DNA
atgaaccatatcagaactaaaattttgagactcatgcatgacattgcagaactttcagagattcatgacattacggaaattgttgaatttgataattatcgactgaaaattgaaaacaaatccaaacatcgttttggttcagttcagttggatgtatataaaacttatgaattttctaaaaaaattaaaagttcatgggatacgattactatgtacattcgcacatccagaaatcgtgaacgtattggttctatttcttctaatatggtatttgcgaatgcattacatgaaaaaatgaataaaattgtagaatctgatttcagtgaagatgatggttttattgggttggatgttccaccagaattagaccaaagtgaagatattcgagatgcattcattttccagaaatcattgttggacaattacaaagaattcgagtacttaatgctttgttacgatactgcaaaaattcttgattgtggtgaactagttatgtacaatgattttatcaattgcaagactgatgttctgaatacactacttcaaaatatagaatctgttaaggaaaaatatgaacgcttatag

SEQ ID NO: 271 - DNA, 567 bp, Asteriusvirus sp.
  source 1..567: mol_type = genomic DNA
atgagtactgaattaattaaagaagtcacattacttctgaagcattgttttaagttcattcctgatactggctcacgccagtacattaaagttaatgagaaatataacatcaatatccttgtatctgaaactgcgagcagttatgctaacattgagttggattctgaagaaaaatatacagtattacaaatcatagcagatgtacaacgtaaacaagattatcgttcttcattttacaacgatcatctgtgtgtttgctcaaacttcagtgagaataaaattgtgtataagaatttatacacacatgaagtgattgatacatataattataaaatttcatctgatgaatacaatgttctaatgttcaacgcaaaccttttgtatgatgccagtactgtacgctgtttagagttagcatataaaattccaaagatcatggaaagaaaagatttgattcactttaaaactattttaaaatacagtacaaaagaattagaggatttagtacaggctcttaagaatttcattaatgaacatgtacctgttaaattcgaggatgcacaatga

SEQ ID NO: 272 - DNA, 90 bp, Asteriusvirus sp.
  source 1..90: mol_type = genomic DNA
atgggtctttttgtgtttatggctttacaagagcattcaggtgtgttatacttgattttaaatagagttggaggaatctatgagtactga

SEQ ID NO: 273 - DNA, 519 bp, Asteriusvirus sp.
  source 1..519: mol_type = genomic DNA
atggataaagatgatattctaattagactaattaatagtttaataaagttctcaaataatgatgtcgatacatacaaagtaggggatattgaatacaaatcatttggtatgtacggtgaggataaaacatattatgcgtcaatgaaatttcaagattttcacgagatgttaatatcgttatcatatgaagatgttgatccaagatggagttccagtatttcactatcgagaatggtaattcgtagtaagcatcgttatatttcgtcaaagaatactcctaacttgattaatattgtgttgaatgaaaatacaaatcccctatctaaacatgatatcgtaccgttaaccgatgaagttctttttcaattgagtaccatttgtgatgaagatgtgatatcatgtatgaaaatttatgagaaggttgggagtgatattcccatgaactattacctaactatagatggaacgtaccttcgagatgaggttctagcgtacattgacagcgttttaccaaaataa

SEQ ID NO: 274 - DNA, 564 bp, Asteriusvirus sp.
  source 1..564: mol_type = genomic DNA
atgaatatcaatgattaccaatttcataggcttgaatttcgtcattgtgttgcatttgcaaaaacattgatgtgcatcattgacactctttcatccaaacaatttcgtaaggataatgatttatttctgaaaaaaggtcgtgtaacatcaaccgatatcggtattgaactatttgttgatatcagtgttgataccggagacagtacaagggttggttgtataggtcatattggtacacattgcttcacatggaatccaaatacaagtcaagtacgaattgattatagaaattcacgttgggttgatcttagtactgaatcagatttagaatcagctatgttccagctaagtttaattcacaatcctaatgaacttctttacattattactttcagttatctgttacaaaactacaataaaccatcaggtttttttatagaatcagatatagatgaaattatggaagagattcccagtttaaaggatattctggaagaaaaagatttctatgaagacttcatagatttatacgacatgcacttggagttatttaagaatggataa

SEQ ID NO: 275 - DNA, 543 bp, Asteriusvirus sp.
  source 1..543: mol_type = genomic DNA
atgtacatagaaaatgagaatgtaaaatgcattactgaaatttgtataaaattaatgaaaattttcattaacccaaaatacaaaaaacgttcattacatcataatattgatgagcattgtaccattaatatactaggtagtattcttgatgtaaaatatgatggtagaatgttatttggcataagagaagagaaaatagatgatgcattcttttcctgtaaagataaatttgaaccttctgattataaagtaattattcgtgatgatagcatctacattagtagtgattattcaaattacttcgataaaatatacactgaaaacgttgactaccattatgaaatgatagatttaccagtaacagacattgatatggagagaatcaaattttcattatcagataatgagtacttaggtatacaaacatattattcactacaaggaaagattccacctgctatgtatataaggattgagattggtaatgtattcaatgataaggttatatctattgctgataaaatattgagggttgaattatga

SEQ ID NO: 276 - DNA, 492 bp, Asteriusvirus sp.
  source 1..492: mol_type = genomic DNA
atgaaccgaaagtacagagaaactatgaagtttgctagggagtgtttagaagtgtttgagttcatcaatgctcataaagatttactccatagatacattgcaatcagtgagacagatgaccataggtacatatgttctcgaattcaagataagatatataagattgtgttctcggaaacatacacagatacatctaattcactatatgattttgcacgtactgattacgtttcatacaaatcttggtctgatagtattaaaattgtgcacaagcaaaatacattttattcttttcttacggacatttccgaagaaagttactttcaaaacagtttaatttatacagaaaaagaactcaaaatgttatatattatgtcgtactttaaaaagtactgcaaatttaatacattatcttttgagatttctgcaatgaaagtattcattaaaaatgtaaaagaattaaagagggattttaatgtacatagaaaatga

SEQ ID NO: 277 - DNA, 414 bp, Asteriusvirus sp.
  source 1..414: mol_type = genomic DNA
atgttcgaaatgattaaaattatacaacgatgtgttgttgacaaacacgggatatatggatatcgtttaagtgctcctattgacaaaaataaaacaacctatgtaagctataatgctgtacaaggatttgatatattcattagtactaaagttcaaatcaaacaagctaaagatgtgtctatgatgactcctgaagagatatttcaatacagcttagttctgcctacatgtatcgatttacaacgtctaggagcgatacagaaggttttacgcgaacataaagtacaacccaataaagttacacaccttccagaaacattcttcaaaacaatagaagtagaaactcctgattatatgttaagtgatgatgagtactacgagaaacacttccctggtaaagattggagagattga

SEQ ID NO: 278 - DNA, 363 bp, Asteriusvirus sp.
  source 1..363: mol_type = genomic DNA
atgcaaaatacgacaacaattcagtacatgactgatggtactgaatactttgtttcaagatatgtaatcaaccacaaccattatgtaacctatattccagaatacaatcaattttatatccagatttatcaatataatggaaagataaatgatatatattcagaaataaaaatccctgattatagtactttatcagaagaggaattgtttcagcagagcactatcagtactgaagatgtgtacgaaataatggaataccagaaggtacttaaacattttcatgaagtacaggatatacaaatagatattcttactgcatggagttatatcacacacgaggtaaattatgttcgaaatgattaa

SEQ ID NO: 279 - DNA, 495 bp, Asteriusvirus sp.
  source 1..495: mol_type = genomic DNA
atgattactacagaatatgattacgatggtgttttagaatttgcagaaaatatctatcgcattgcaaaggagttcagaagtcctgacccatttggtggtatgttcgaatacgatgagtttagttcatccaaaggaagacttgcgtttactaatgtaagaggtaatcaaatctatgccgagtactttgatgacaatgactttcattacaaagccgaatacatttcatattgccctgggtctgatttgaagattaatattgacaattatagagaagcagtatttgttaagtatgatgatttagtgctcatgtcagaggaaatgtactttcagggttcttgtattcatgatgtaaaagtacttaatgctatgttattttatggtgcactacttcatcattacaaatacaaacaacgattctttttagatttagtagtatactataaatgcgtggattatttgaatgcaaaatacgacaacaattcagtacatgactga

SEQ ID NO: 280 - DNA, 477 bp, Asteriusvirus sp.
  source 1..477: mol_type = genomic DNA
atgtccaaagacctatcatttagcaatgcacaaaaaatagcaaaagacattatcagggtttataaatttcttacaaatgttactgaagatttttccgtaggcaaacatacagtcaaaaaacgaaatggatacctttcctttatggatgggttactctatagttcagatgaatcaacttgtagtattagagtgcttgatgaagtaccaagtggtgattttatttcataccatttcccaagttcagataatttcaaatactacaatcatcatcttataaatgaaggatttgatacggctgaaattaacactgaagaagagttcttccagtacagtactgtgtatccagagaggattgttttcagttcagtgatttacactgcccttaaaaatgaactaaattcagatagtgatcatttctacttggacctgaacaatctcgattgtattattgagtacctggagaaaaatgatttatga

SEQ ID NO: 281 - DNA, 537 bp, Asteriusvirus sp.
  source 1..537: mol_type = genomic DNA
atgttagataaaaaaatgaactctggaacccaatataatcatcttaagttggatacattcgaatcagctatcagtacagcacaagatataattgatattatcaagttcattaaagaagataagttcaaatgtttgaaaatactaaatcgttcaatgtaccgtgataaaaatattcatgtatcagtacgtagaccgaaagatcaagaaagtgggagagatttctataacaacagtgagcagttcgaatgtgaatatgatccagaatttagaggtggtttcatgtgttacagtatgaaggatacctcacacattgagatacgttcatcgaaaggtggcatacgtacattagagtttattgatatagttttaaatcaggaatactactttcaactatcattattgtttcctgcatacgatttaggagttctattcatgtataagtactttcatgagcactggaatgaagacttctatctggacttagaagattaccaattagtttggaaagaaatggtagaacttcgcaacccatcttga

SEQ ID NO: 282 - DNA, 342 bp, Asteriusvirus sp.
  source 1..342: mol_type = genomic DNA
atgcgacgtgaaactgaattagttaaagtaatgtacgctactcatattaaactactacttgttaaatttgattataataaaaaacataatgatttctatactttaattcgtgatgaaaatacattctccttgcgatgcaacaatatacccttgaagataaatgattttacttcacttgacgagggggaattatttcaagaatcattagtttttaatagtaatataaaaattgatatagaagttattaaaaaataccagattctattgaacaaaattatgaattgttatccatgtgaaataggtggtcatatgcagttcaaatcaaaaatgtatgaattatga

SEQ ID NO: 283 - DNA, 378 bp, Asteriusvirus sp.
  source 1..378: mol_type = genomic DNA
atgaagattgaatttgaagttattacatatagtataggtgatggtatccgttgctatgtacaagcaaggcatatggttcctgatgataaactgtcacccaaaagcttctgtatcacacaagatctcttagatatcaacggagagtacaagtacatatattatcttactaagggttattgtagtacacgtggttttaatattgtagctgtttctagagatgaaattgatgatttaactgagtacggggaagaagagatgttccagtacagtactgtttttaatgaactggatgtgtttctgttacgaaaaatacaacacattatgcaagaatgtttgcatcataagagaggtattgtatgcgacgtgaaactgaattag

SEQ ID NO: 284 - DNA, 282 bp, Asteriusvirus sp.
  source 1..282: mol_type = genomic DNA
atgtttgatatggctgcatatgaattagaattatcagaagatggcttcaagagctatgaagtatatagctatgtccgtgaagatgtaattgacactacactaatgcaagaggatgagttattccaagaaagtttagtatgggataataagtacgattgtaactttgatttcttatgtttaatccagaaagaaatgaaaagaatctttgataattatccaatcaaacgtttcagtactgcacctgagcaatataaaaggattatattcacctatgaagattga

SEQ ID NO: 285 - DNA, 603 bp, Asteriusvirus sp.
  source 1..603: mol_type = genomic DNA
atgtcaataaatgcaaataaatgttgtagtgcagatgtgcatttgttttttaagaaattagcaaatgatattatatatatgcaggaaatgatttatcacaaacgagcggatttagaaaaagcattagtacagttctcatttatgcttgatggtgatatatttctagagagtgatgcattgcgaatagtattagataaaaatgctaaaagatttttatttcatatagataataaattatgttcctccgtatgtcgtactttttataatcgtgattcggacttatatcaattcctttattctaaaggtgcagtagaagcatcatatggtgatggttatgccctaggaaagagtattccatttatgaaatcatttaaaatagaacacatcagtactgatgaagatgcaatgttcacaaatgatataactatgggacgtgaagatgcaatgcgatatattacaaattctatgtatacattctttcaacgaacagaatttgataatgtatatatatcaaatgtaaatattttcaatgacctgtgtcagtacttgagaagtgtttgtaatttcgatgaaagctattgtaagctatatactgaggtataa

SEQ ID NO: 286 - DNA, 561 bp, Asteriusvirus sp.
  source 1..561: mol_type = genomic DNA
atgtacgatgatttagatcttgcgtttgaacgtatggtaattttaatgcaatgtgcagaaatgcatgaaacaatccgtcgcaccaaagggattgaatatacaagtaaactattctcatacgaaagtcgtcgagggatggatcatttttactgcactgattgttcaaagttttcagtactgaaatattatcatcctactgtttccaataatagtttaatatccacatatgacggtgatctgtttagtgtaatgtatgacacattacatccatcaatttcaatctataaagattgcgatagtagtttatcgtatataattgaagattacttatctcctaatactgaagagaatatttttcagaacagtgtgttgcatgatgaattaagtataaaatgcatctatatgttcaataagttaaaagagtacgccgataataattacttcattgatgatttagcggtattgtctgtttccgtttttaatacaaatgatattgatatgaaatactataatgagatttgtaaagtacatcatatgtataaggaactattatgtcaataa

SEQ ID NO: 287 - DNA, 135 bp, Asteriusvirus sp.
  source 1..135: mol_type = genomic DNA
atgatgcaaacagactcatatagtactgaattcaaagagttgaaagtactgatgtacttgggaacccaatatcaggaacaagttattttggaatatattaattcgttgaagaaggatatccgttatgtacgatga

SEQ ID NO: 288 - DNA, 183 bp, Asteriusvirus sp.
  source 1..183: mol_type = genomic DNA
atgagaactgtgagtgcagtgtgggacatatggttcactactaaaccaaaaatggattaccatgactttaagctcttgttcttcgttggctctaacaaacaggatgttgcaatgaagggttatattcagcacttacaggaactaatacagaagagggttaatgaaaataatagaccaagatga

SEQ ID NO: 289 - DNA, 537 bp, Asteriusvirus sp.
  source 1..537: mol_type = genomic DNA
ttgagaaaaattaacattaatgattatgatgcattacaagatttatcaaaaaagattcgcataatcgtaccagtactcaaaaaatgcagtactggtttaattgatcctagtactgttgttaatgagaagtacaattttcatcgtgtattacagggtacaggtgcatttcagaagtgtgatgtacgtgagaaacacgtaattgatacatcattgttttctattggtgcacctgtgtcgaataattctattttcctggataacgcaggaaatattcaacaattaacatttaagaaaaggaaaaagaacaataacattggtgtgtacgcgatgaagtgggggcaacctgatttgaagcgtgaaattcacatccctaagtacaattacaatgcatttgacgaacagtgttttcaactatcgtgtactgaccctgactatgcaatcattcagttctatatggaattgcagatagcatttaacagtaatttatatattaacttgttggcaatgaacatcgatgaagtattcaaaaacatttaa

SEQ ID NO: 290 - DNA, 447 bp, Asteriusvirus sp.
  source 1..447: mol_type = genomic DNA
atgagttacgaaagtgcaatcaagaaagcaaatgatattctaaaagttgttaagttcttcaaagaaaatcctgaatacgtagatgatgaacgaagagaagtttctaatggcacgaatattacaattgattctttatttgacactaatggagataattggagtctaattgagttagcatacgattacatttcattgaaccgcaaatgtgatgaagttaatattgagagacatgaaactgtagaatcttttaaaatttcagatattttatccctcagtactgaagaaggttacttccagggtagtactgtttatgcagaaggaacacttgacaatctatgtacatttagtgtactatatcagaaatcagtactagatgtattttatctagacactgaaaaacttgataggttagttgatttcgttactatagaagaggcatccttttga

SEQ ID NO: 291 - DNA, 309 bp, Asteriusvirus sp.
  source 1..309: mol_type = genomic DNA
atgacaaaaaatgaatttgattcactttgtacggtttataattcattgacagaaatacctgactttattaattacatttcagcgttaaatcatattatgcatagttttgaacaatcgtttgaagagaaatatgcaggtagaaaagttctatgtcatatgtcaatgtacttaggagatggtgagcctttcactaccagtactacatgtgaaataaaaaaatataatatattattgggcacaatagaattcacagtatccaatggtggtagttatatgtactttagagatggagtggttgaattattatga

SEQ ID NO: 292 - DNA, 315 bp, Asteriusvirus sp.
  source 1..315: mol_type = genomic DNA
atgaaaaacttattcagtgttcagtacgtccctggtgaaattggtttattgtatctatttgaccatgataattcattattactagtagtgaagaaatgccaagctagttcgtttgttgaatacattcacgatagtgaatacattcctgatttcctagagtgtgattatcaagatgaacatgaatcatttatttttcaggaatcactagtatgggataaatcgatcaacttctttacgttaattgaattacaaaagcaggtgaagtattattgggattacttaattacacaggattacattgagattgaaacataa

SEQ ID NO: 293 - DNA, 453 bp, Asteriusvirus sp.
  source 1..453: mol_type = genomic DNA
atgtcattacaaagtgctcttgaaaaagcaaaagaactacatggatactttgaagatataaaggccggaaagttcaaagaagtgtacaaagccgagaacggtaactactacaaagatgaaatgtataataactccgttggtgtaagggttattcttgggttgaattccaatagtcctatatcgttttctgaatacaatagagatgcagaatttattagttatgttgaaaatggtagcattcgttttattaatagacaaaaaccattaattttgaattatgaagtactgcatggtcagtgggatagtgaagagtattacttccaaaacagtactgtatatgatgatgaagtacttgaagcattagttattatgtggtacttcaagagtgttagctgtcctcgattttatttggatttcgaagatcttcgtaaagatccagaaggtatagaatga

SEQ ID NO: 294 - DNA, 489 bp, Asteriusvirus sp.
  source 1..489: mol_type = genomic DNA
atgtcattacaaagtgcgttgaaagaagcaaagaagattcatgagtacatgattatggtacaggaaggttcagtaccaggtgtatacaaaacatcagatacggaattcttcgttaaggatagagatgattatgacgattcagaggtatgtgcagaaacattagtactgcacactgatactggtgacagtgataactgtgaatatcatatgtacaatcagtacattagttattgccgtaatgaagatattaccatctacaacacagatagtgatgctgatgacactatcattccttattcagttctggaaggtcagtgggatagtgaagaatattacttccagaatagtactatctacaatgaagaagaactggatgttattgtgattatgtggtatttcaaaagtattgactccagtagtttctattttgattatgaatatgtagagaatacagtaggagaaggtaatgtcattacaaagtgctcttga

SEQ ID NO: 295 - DNA, 441 bp, Asteriusvirus sp.
  source 1..441: mol_type = genomic DNA
atgagtttagaaaaagcactagaactagccaacaaaatacatcagtaccatgataaaataaaaagtgggttctatgctgataaagtacatgcatatgggaatgaatattacctcactggagtaaagagatactctaatgatattttacttatgggtcatgataaagacaataatatacagtactcttcatgtagtcaatatactagttttatggtatatattcctggtactaagattacttttgacacatcaaatacacctgttgacttcggagtgcttgatggcccgtggggtactgaagagtattacttccaacagagtctcatttttaaccaagaaatgcttgattccttggttgtgttgtggtactttaaggaattgaattttgaaccattctttcttgactggggatcatgtgagtatttaatttcaggggaataa

SEQ ID NO: 296 - DNA, 471 bp, Asteriusvirus sp.
  source 1..471: mol_type = genomic DNA
atgagtttagaaagagcattagagattgcgaagttaattgatttatgcagcaaagaaattgtagcaaattgtctcaatggatatctattcaaggaaggtaaatcttattgtcgaatgagatacgatgacagtagtgagtacattcacatgtacgatgaaaacttagattcttctgaaacaacactcaatgggtgtgatgttaatttggaagataattacatgtacttctgtcgtgatgctgatattttaatacaagattctgacattctaactggtggtgaagagaaacatcttccgtattcagtactggataataactggggtagtgaagattactatttccagcagagtactatatataatgaagatatacttgacaaacttgttatttcttggtactttcataacacggattatagtagcttctacatagacttggatctactaagagtacttaaagaggatatatga

SEQ ID NO: 297 - DNA, 447 bp, Asteriusvirus sp.
  source 1..447: mol_type = genomic DNA
atgaatatggtaaaagaaggttcagtttacggtgttttcaaagacacaagtactcaatattatgtaccggataacctccttaataatgactactcagatacagaaacgtgcgtactggatacagaaacgtgtgtactggataccgaccctaatgattatgaatgtttcattgatatgcataatgaatacatggtctatattaatgatgcagatattaccatctacagtactgacagcgattccgatgacattataattccgagtgaagtactggaaggtccgtgggatagtgaagagtattacttccaacaaagtactgtatacgatgatgaagtacttgatgttattataattatgtggtactttaaaagtattggttctgggaacttctatttcgattacaaatacgtaaagaaaacagtagataacggtattaacaggggttga

SEQ ID NO: 298 - DNA, 360 bp, Asteriusvirus sp.
  source 1..360: mol_type = genomic DNA
atgacatatgattattctatgtattattataagttacctaaaggatgggacttgtgctgtaatcttattaagggagactcggaacatgagttgagtttatatatgcactacaaagattcttgttttaaatttattcatgtattacatgatggctatgactatgaatctgagagtcttatagattatacagtactggacgatggtgaactatttcaggaagcattagtgtttgataagaataagtactcctgtacatttgaagaaatggtttctttgcaaaatgaaatgaagagatttgaaaaagaaaacgtatttaatccatccccatcaagaacgaataattattatttcaatatatga

SEQ ID NO: 299 - DNA, 357 bp, Asteriusvirus sp.
  source 1..357: mol_type = genomic DNA
atggaatttgattttttaatatcagtacattcttttaagcacagttttcagtacttttgtaatttaaacaaaggtgatttaatgcacagtgcgaatgagtatattcattttactgatggtaaattctcatttattgattacagttcattagattttccatacactgatatgccggactatacattgatggatgctggtgaactatttcaagctgcattagtatttgacaagaagtacatctgtacatttgaagaagtaattactatacaaaatgaaatgaaggtgtatgcatccttgaataaacctaatgaatgtattaatcaagaatacaaattcaatataggaattccaaaatga

SEQ ID NO: 300 - DNA, 369 bp, Asteriusvirus sp.
  source 1..369: mol_type = genomic DNA
atgaaaaaagaaattagaatccaattcggtatgaggaaaaaagaggtcatctgtacactgaatcatgcggacgtggaaatgggtggtgcattacaaaaattctcacattttgttcttgtactatatgaaaatgggtcttttaaaatcttcacatatgatgattcaaaaaattaccgtaatgattttgtaaatcttacagtactgtcagaagaggaattctttcaggaaagtactgtctggaatttacaaggagcaccaattgaatacgtccgtgctacacaggtagagatgatcaaaacaatgcagaactatccagaagattatatgactaagtttcctgaatcttttaatgtagaggttgagtactga

SEQ ID NO: 301 - DNA, 225 bp, Asteriusvirus sp.
  source 1..225: mol_type = genomic DNA
atggaatttgattttttaatatcagtacatacggtcaatggtgcacctcagtacctttgtaatttaaacaaaggtgatttgattatggatacagatacagaggttgtatacagttctaatgttctgtgcaaggaatttcagaattcgaaaatgcttgagttattgtgcattgctgattgtaatattctgtacaaattcagtactaatctgaaggagattttatga

SEQ ID NO: 302 - DNA, 339 bp, Asteriusvirus sp.
  source 1..339: mol_type = genomic DNA
atgtacactggtgagttagttacgcactctaacttatacaagggtgatttaaactacgctagggacaagattttaaagtactggaatgctgacttttatttgatggattttagtactgggtttaggggtaaagcaaccgagatgttggactatacagtacttgatgatgctgcactgttccaggaggcattagtatttgataagaagtacatctgtacattagaagagatgattgaattacagcgtagaattaaatgtattcacagggaatgtatagatatctggtgcagtactggtgaagataatttttgtaatcatttcaatctaggggaagtgtga

SEQ ID NO: 303 - DNA, 90 bp, Asteriusvirus sp.
  source 1..90: mol_type = genomic DNA
ttgtgtttttcagagtacagttcatgtttccttaaacaaaaaataccccgccaccgaacgtgctctttatattggagtttaccttattaa

SEQ ID NO: 304 - DNA, 210 bp, Asteriusvirus sp.
  source 1..210: mol_type = genomic DNA
atgagtccatatacgatgaaaggttttgaattcatgatggattcgattttgaagaattcgtgtttagtacacaatcctgagcgtacaacagtgagggaatatcaggacaatgcattacagcgtgtaatgaatatgtacaggaatacgagtcgcaagctttgtgcgttgaaaaggattgaagaaatcaaggtttctaggctgaataaatag

SEQ ID NO: 305 - DNA, 210 bp, Asteriusvirus sp.
  source 1..210: mol_type = genomic DNA
atgaaaagtgcaagtaatagtgatattgcaaaggagaagtttaagtgcagtttagattacggtttaaataattttcttacatgcacaatgtacagggatgatgattatgaacaatccgtaatttcgttgcatcgatatttcgaaataatttacgcaagatatcttagaaggttagagggaataggggattggaattatgattacgtttga

SEQ ID NO: 306 - DNA, 171 bp, Asteriusvirus sp.
  source 1..171: mol_type = genomic DNA
atgaaagagttatttgaagatcagttcaatacatatgtggataatattctttattccagtcgtgccagtcaacgaggaaatcgtgcttacaatattgattacctattagtggtgctgagttcacagtacaccaatgcggtacaaagggtttattatgaaaagtgcaagtaa

SEQ ID NO: 307 - DNA, 552 bp, Asteriusvirus sp.
  source 1..552: mol_type = genomic DNA
atgagttcaatgagtttattagatacattagaaaaagacagaagtgcaattaagcgtttaaaagagcaagtacaaaagattgtatacaacgttgataagtttgaggttcccggaagatttggtgatatttcccatacggagatcaaatcccttaagtcagatttgttgattaaaaataaaaatgggttgattttagttttgagttcagatatgatgggggcaacacatagttataatgccgtatcggtgcgttccgagtgtgaaggtatatatctatcacagggtttcaatagcgagacacaggtttgtttttgtgatgcagtacatgaccctatgaagttcacgagaagtgaagcccaagcgttattagagctatcagacgagagtttgtttcagtacagtacaatgtatgacaatgataagcttcgttgtatgtacgctgtaaagcattatacacaggagttctctggatttgcataccttttagttagaaccaataccatatatattgatatgttagaagattacatcgataaagttgttaatgtatga

SEQ ID NO: 308 - DNA, 345 bp, Asteriusvirus sp.
  source 1..345: mol_type = genomic DNA
atgagtagattttcagtttatatagtaaacgtcagtaaagatggtagtttaattgaatttgatgtagttgataacaatgataattcatatggtattaaggtacaggacaatgatgtgcagttcagtacaagaacaaattttgaaaatccagtccaagttcctaatttcatagaagatgaagcagcacgtttccaatacgaaacggcatatgacaatgtacatatgcatattattatgcaaacgagtttagttcaattagttcctttgttcagacaaaatatatatgtacatgaagtgtcgattaatggcattcaaagttccgttttgttcgatacaaatatgtaa

SEQ ID NO: 309 - DNA, 516 bp, Asteriusvirus sp.
  source 1..516: mol_type = genomic DNA
atgcatcaacacaagcatcattcatatgattttgcaattaacattatgaagttcattcgagcgttggaggatgggaagcttagtcataagtacaggaaagagggtaacaattggttcagaaatgattccgagttcagttgtcataaaatcgtgtatagtaatcagtacagtgccaattacctacaagatgtagtgatgtgttttgaatacgtgttgcagttcaggggttcaatccaagatgagttgatggagaacatgtacatccgataccttccaatgctcaaagatgaaaatgtattattaaattcaatatatcaacgagttcgtgaaatagagtgcagggatatattagatacagaagaatcgtatttccagcaatccctgatttatgcacctgatttattacaggtacataatttgtttaatacattacgtcaaaacatcagtacagacatatttttgtcattatcggattatgatacatttgtcaaagatttagaggaaataggtttatga

SEQ ID NO: 310 - DNA, 195 bp, Asteriusvirus sp.
  source 1..195: mol_type = genomic DNA
atgcttataattgatattaaacaaaaataccgtaagtttgattggttcaccgatagtttccagcttgaattattacatatgaatatcagtgaaacattatgtgcagaaacacaagatgaatttgatgatagagtgatgaacatagtaatgctttcttgctttaaacattttggttattttttcggacagaattga

SEQ ID NO: 311 - DNA, 615 bp, Asteriusvirus sp.
  source 1..615: mol_type = genomic DNA
atgaccagaattaaaatgtatgatttgatgcagtacagtaaaattgccattccagtgcttaataaagtgctggatgcattcattgccaaataccctgagaattcagtgttatgtattccatttagtgttccagataaagatgatatattccaagtgaatgtcagtacacgtggtattacattgcagcagaaatacatggatacggaatattatggaataaagttggattctgtacagggttctaaatcagcctatgatttttttgttcctaataacatcgagtcatgggaaacaaacatttcaaagaaagatgaaaatgatgttcctattagtggtgtgttcaacaataaagttttttattattacgaaaccgacaaattccctgaagagttatattacaattcagaaatgaatgaagatgtagatgcattcatgtttcaattatcgttagtacatgatatcattgatgttcaagagttaagagcagaaatcaatttagctaaagagttatcggacatgctgccaccgtttagtatgcttttttgtgaaggaggttatttttcaaaagaagtgtttgaacatttcgtagatgttgtaaaagggttggatatatag

SEQ ID NO: 312 - DNA, 528 bp, Asteriusvirus sp.
  source 1..528: mol_type = genomic DNA
atgagcagtgaagtgctgaaatcaatgacattcaatgaaattggtacatttaaagataagatcattgattgcattgaatacatgatttgtagtaatatcgaaagtatcgagatatttaacaagacaaatcgctcttaccatatgatgtacattgcaaacaataatggtatcattccatttatttcggatagtacaatatggtacgcatgtgatacgaaaaaaaccacaataggtttacattcatttgagacacattatgatctaattattcctgaacattgtatgcaagaagaagaatattttcaaatgcaatgtatacattcaccattagtgttgtttagtttatatattataccttatatcaccaaatgtgttcatgagaataaagctccgtggaatcatgaatttgtatcgttgaagttattgtataatgtattagtagaatattatgattacaggcacaatggtacaatcagtgatgtatgggattttgaatcgctaagggtgaaaacatacacaggtgaatga

SEQ ID NO: 313 - DNA, 543 bp, Asteriusvirus sp.
  source 1..543: mol_type = genomic DNA
atgtgtaatcattttaaaggagaacatatagtgagtttcataatccctagtacatacgaagatgcatcaagtgcagttcataagattcattatatttttaatttaattattagatctgcaaaaattaaaatgtatgcacctcttgtgacaaataatcgaaatgaagaaatttttattagcacagacaaaattatttttccatatttcaatgaagatagattgtggttcatacatttagctgcattacaaaaatataagatgtcaattcgtaataatttggatataccgttatatcatcctgatattggagaggatgaatattttcagtacagtacagtacaccgccatgaagatatctttgttgctatgcttattgctaaattgaataccgttgatttggagcagtacaaatacaataataaatcatgtaagatcataatccctgcattcatagctctttatgattatgtggtgcataacaaaaaagatgatacatatgctttcaatgaagagtatttgaatttttttaaggagaacatatga

SEQ ID NO: 314 - DNA, 507 bp, Asteriusvirus sp.
  source 1..507: mol_type = genomic DNA
atgcagtacatgtatgatttagagttcagcttagatgctgcatttaaatatgttcacaagatagaaacaatatacagtacattatgtgcaataaaatcagtaacagaagagcttgatgttggtgaaaaatatcaggtatggaataatacatttctaaacaaagaacgttgctctacggggtttaatattttaacatttaatcccagcaattgttacccagagaagcatgaacgttatccgaatgacgacatgtggtttgagtacaaagaagattgtgatatgtcatcccttgtagttcctgatgattttaatgccgaagatttaacggaagagtggtggtttcaacagaatttagtacacgatgatattgatttatttttttatgtagtatttaaaatgctttaccacaacaatatattaaaagatagtgtgtttttttcatgtctatatattgatgatttgtacaatgaaatccaaatcaacatacccagaacgcctgtatcgtaa

SEQ ID NO: 315 - DNA, 342 bp, Asteriusvirus sp.
  source 1..342: mol_type = genomic DNA
atgaagctgaataatacatttgatattaataagttaagagaatggttttatagtattgaaattgaagccatcccgtatcatagatatgaacaatataatttaaccagtattgatatcagtgagttgtacgcgtattatcaaagtgcattagagatgcataagttatttttgagtacagattttgttctaaattacaattttgaggaatttaataattataatttagtacagaaatatgtagtagcaaagtatatgtaccttcaaggaattacaagtaatttggaattcaatacagtccttgctttagttgaggtaattttatgcagtacatgtatgatttag

SEQ ID NO: 316 - DNA, 567 bp, Asteriusvirus sp.
  source 1..567: mol_type = genomic DNA
atgacctcgaagtaccgtaccagcaatgaaattcagtacacctacgctaatgcaatccttatgggacaaaagttagcttgtattgttgcagccttatataatgcacagaaagattacaagcgtcatatccacaaatgtattggtattattccatcgaagtacaatacatatattgcgtgcacgagtcattttgataaacgattcaatacacctgataccccaaatgccagtagtgttattggtcttttggatttcgcacctggtgctgttattggaaagaatgatttagagtacacatggtataataaaaatgccccgttagtaatggtaaaatatgatacagaaacgaataaaacaatagagtacaatacatataaatcagaggaagaatttttccaaggttcattgcttgtgccagtgcgtttgttgttttataatgtccttattagtacagtacacaatagtccattacacaagaatcacaaaattaatttcaatttttgtgcttatgcgattgatggtgtgtatgagtgtttaatggaggtattgagttatgaagctgaataa

SEQ ID NO: 317 - DNA, 312 bp, Asteriusvirus sp.
  source 1..312: mol_type = genomic DNA
atgaagtataaaatgatgtataccccagatatgatttatgttgaattagaagatgatgacgatgggtggaatttgatttattcaagaagttcaggttggtacatggcacatttaaatgattcgatagttacagattattttgtagatttcaatacattatccgatgaagaattgttccaacagcaattagtaattgacacgggtggttatgatgttttattattaaaaaagatacagaaagctgttattgattttaagcccaagatgttgcaaaggaaatattatgacctcgaagtaccgtaccagcaatga

SEQ ID NO: 318 - DNA, 546 bp, Asteriusvirus sp.
  source 1..546: mol_type = genomic DNA
atgaatgatatagaattattagcacacaagattagtacaataatgcttatcctcaataacaaccatcctatatcgcagatagatggaatcctgagtcagaggacaggtggtagtttatatttgacattaacagaggttatcgcaaggaattacattgatattgaaatcgagaacagtgatgcatcaggaaaggttgatgtaggtgcattaatcagttcaaatccagtatcagcatccccattgaccaaaggtgttagtacaggattcgaagggtatttgtggtacaataccaatgatgattattttatatatcagcattccaatacaaattatgatgaagacaaatttcagttcatagacccttatgatgaagctgaagtatttcaaaaatcattaatcacaaaaccgcatgagatgatgtatctaatgttattcagtacaatgcatttgaatccattaattaaaggtttaaaattttatattcaattgaaattagtccatgtagtttatgatttattaatgcaaggatatagttatgaagtataa

SEQ ID NO: 319 - DNA, 201 bp, Asteriusvirus sp.
  source 1..201: mol_type = genomic DNA
atgcacacaccgcacaaagagcacacagagcacaaaaatacaaaaacgataaatgttttaaatgattctttattggtgagtataaatttatattataaaattcatttaaatggtggtattgaaaattttagttattatttgagtgcaatatcgcaagagcatttaatataccaagatcatttattgcacccgaatccataa

SEQ ID NO: 320 - DNA, 162 bp, Asteriusvirus sp.
  source 1..162: mol_type = genomic DNA
atggaacgattagggcgattagattattacacaattaatacaaattatttgttgcgtaatataaaatccgattacaaaatatggataaagaacagagatagtatgtgttatgaattttatttagattatgccatcaaacgctttttaagagaagaacattaa

SEQ ID NO: 321 - DNA, 390 bp, Asteriusvirus sp.
  source 1..390: mol_type = genomic DNA
atgaacccaacaatagtacaggatcttaaacaagtaatattccttttgaatacaagaagtgaaatgtatacagagtttaaagagattaatgcattttatcagaattttgtaattcaagagttcagtgatttaattacagatgcattatttgaattatcggaaaaatacaaaggaacagagttcagtgttaaaaatgtattacgttctttatcaacgcgtataataaaattagatcattttacatttgacaataaagatttattcagtcataatccaagtacagctttatattttattcctgattcagacaaaaatcatcctattcattacggatggattttgtcgtacatagtacaaggaaaggagtatcctattaaatggaacgattag

SEQ ID NO: 322 - DNA, 267 bp, Asteriusvirus sp.
  source 1..267: mol_type = genomic DNA
atgcaaaacacagggtattataaaaaagtaaaccaatatttgtacgctacaaagtacagggatttttgtttaaagggtggtgatgaagatttttctttgcgattatcagaatttaatctgttattttatcttggtacatcggaacaagaagaaatggcacagaaatttatcaagcaccttgaacaaaaaattcatatgcaaattttgatgcttaaggtacataatgagataaacaaatatgaacccaacaatagtacaggatcttaa

SEQ ID NO: 323 - DNA, 216 bp, Asteriusvirus sp.
  source 1..216: mol_type = genomic DNA
atgtcaatgtacaagacaattaatcaagaatggaagacccaaaagtacagggaattcagtactagtttaacaaaagatgcattgaatttaaaaagaacagagtttgatatgtttatttttcttggaacacgttcacaggaacaatacattcattattatataagttcattgcgaacggagatcgtatgcaaaacacagggtattataaaaaagtaa

SEQ ID NO: 324 - DNA, 321 bp, Asteriusvirus sp.
  source 1..321: mol_type = genomic DNA
atgaaatttaatatagcaaaaacatctaatgtatgtatatttggttatgctgatgagttaggtgatattgacattcttttgtacaaaaaggatggtgttatgcatttcaagtaccaggatgaagaggcagacaattatcctttacctaatttagtacaaatgcaggaagatgaattattccagtacagcttagtatatgacattgatatttgcacgatgccagtactaattaatattcaaaaagtgatgatcgatgtgtttgataggctaatacaaggcacacaaggaagaaccatatatgtcaatgtacaagacaattaa

SEQ ID NO: 325 - DNA, 246 bp, Asteriusvirus sp.
  source 1..246: mol_type = genomic DNA
atgttaaaatttttaaatttccttatcgtcttgtgtattgttcttggaattgcaccgtttgtattagcgtatctggattcagatgaaatgcagaagatgaattgcacaaagacaggacagagtagagaagagacggttatgatgcctgtaacggttattgtgaataacataccaattacgaacatgattcctaccctaacgacaacgtaccagtactcttgtgcagacggagagaggtggagatga

SEQ ID NO: 326 - DNA, 345 bp, Asteriusvirus sp.
  source 1..345: mol_type = genomic DNA
atgaaaactaatatacaactcaaggtatataaatcatttgaacatacatatatcaaaagtagtctatgtagagatgtaatggattacaagggtaagccattcacaattacctatgattcttatgttagtgatttatatatatcatttgttaattacgaaaataaaatatacaagcacgttgatattaaagatttaagtactttatcaccagaggaatactttcaggaatcattagtatgggatttagagttccctatgccattagtacataagatgatagtactaatgaaagaatctaaacaggagcctaatagtggttatgaagaacacattattgagtattaa

SEQ ID NO: 327 - DNA, 261 bp, Asteriusvirus sp.
  source 1..261: mol_type = genomic DNA
atggagtatgtgtttaatatgaaagtactgacagaattagaaatgtatcatagatttaataagtactatcatttacttaaacctatacagaggattaagtgtccatttgtagtgaaacaggtattaatttatgagcataagttatttgtatcattaggtacgaatgaacaagagtattatttgaagttgtacttgattacattaatagatttaattcactataaaaccaaacaagctaataaagagaaatatgaaaactaa

SEQ ID NO: 328 - DNA, 222 bp, Asteriusvirus sp.
  source 1..222: mol_type = genomic DNA
atgagaatcataacacaacaagatattcttaagttcacaagggttcatgcatctgaatttgatgctatattatcaaaaagttacaacaacccttatacagaagatgtacactacaatgaattatggatgtatatacttttaggtacagatcatcaagagcaagccgtacagaggtatttgagtgctttaagtactgctactgctaatggagtatgtgtttaa

SEQ ID NO: 329 - DNA, 216 bp, Asteriusvirus sp.
  source 1..216: mol_type = genomic DNA
atgaaggtaatatcaaaccaagagtacttggcactattcaggaagaataatcacaaatatatggcacttgatacaagaactgatataggggaacttgaaaaaaatcttttgcgttcagagatgatagtactgacactcttaggaacacagcatcaagaaagaactgttaattcacacatagaaatacttaagaagcttatacaggaaaagttatga

SEQ ID NO: 330 - DNA, 216 bp, Asteriusvirus sp.
  source 1..216: mol_type = genomic DNA
atgccaaaaccactaggaacagcagaatacattgaactcatgggattacacttctcatcctttcagaaacttatgcgagaatcaaagaatgatttagaatataccatcagaggttcagatttaagaatgcttctcaccctagacacagattcccaagagagatttgtcaatgagcatattagagcacttttaatggaaattaaaagtaaactatga

SEQ ID NO: 331 - DNA, 216 bp, Asteriusvirus sp.
  source 1..216: mol_type = genomic DNA
atgattaccgacgaagaatacctaacaattataaatggattgtttttgaagttgtttgttattaacacatcagatataccagatatggataaaattattaagagaaatgaaatctatgttctagctaccctgggaactaactatcaacaatacgatattaatgattatattaatacacttaaacgagcgattgaactaaaatgccaaaaccactag

SEQ ID NO: 332 - DNA, 222 bp, Asteriusvirus sp.
  source 1..222: mol_type = genomic DNA
atgaaaattttaagcaaaggtgattcagtaatattacttatagagagttcaagtaaattcttaaacataacactgtctgatatagatgaagatgataaagaagtactgagagcagatttaagagtactgttacatctcggaacaaacctacaagaagaatatgtagagtactacattgatgaacttaaagaatcagtactgagaagatgcaaatgcgaatga

SEQ ID NO: 333 - DNA, 231 bp, Asteriusvirus sp.
  source 1..231: mol_type = genomic DNA
atgaaacacttgacagatgatgaacatgggcttatagtaatggatgtaatcaacatcgaatacaaaaagttgatacgctaccgttgttatgaagataagcaactagttctagcagaacagaagttgtttcgactcttaaacacaaactaccaagcacaatacgaagaatcgtacatgtaccttttggcgaggaaagcaaaaagagattatgaaaattttaagcaaaggtga

SEQ ID NO: 334 - DNA, 246 bp, Asteriusvirus sp.
  source 1..246: mol_type = genomic DNA
atgcaaaatgaaatgatatacttaacatataatgaatacgtcgagagattagttagtgccaagagatatacaaatcaacttcctcacaacccaaaccaaaccccagaggaaaagaatgcggaagctctattccaagcactaccataccttcttggaactgataggcaggagtatcacgttgaacgtataattaaatctcttaaaatcactattaaggaaaagatacatgaaacacttgacagatga

SEQ ID NO: 335 - DNA, 243 bp, Asteriusvirus sp.
  source 1..243: mol_type = genomic DNA
atgcaaaagcaaaatgaaatgaaatacttaacagacgatgagttaaaagaacgattaattaaatccagaaaacttacaaatcaacttcctcacaacccaaaccaaaccccagcggaaaggagtgcagaagttttattccaattacttccataccttcttggaactgatagacaagaggaatatgttgcacgtatgattagatatcttaaaattactattaaggaaaaagtaaatgcaaaatga

SEQ ID NO: 336 - DNA, 237 bp, Asteriusvirus sp.
  source 1..237: mol_type = genomic DNA
atgcaaaatgaaatgatatacataacgaatgaagaatttcaagagaagatgttaaaaacaaaaaacattaatcttaagttcgttccaaatcaatcaatatatgaagtatctgcaaatgtattgtttcagaagttaccatacgttcttggaactgataaacaagaatttatggttcaaaatatgattgaacatcttatgatgagtattaaggaaaaagtaaatgcaaaagcaaaatga

SEQ ID NO: 337 - DNA, 216 bp, Asteriusvirus sp.
  source 1..216: mol_type = genomic DNA
atgattaacatcacattacaagaaaggttcatacgcatcaactatgcaatttccaaattagatgctacaataggatttcaaagtctaccatacaaaaccagattgttattagagtgtgaagctaagttgggtgtactgttagggacgcaacaccaacaacgatatgtggaaatctggattgaccttttaacccaaaatatatatgagagaatgtaa

SEQ ID NO: 338 - DNA, 267 bp, Asteriusvirus sp.
  source 1..267: mol_type = genomic DNA
atgaaaatgatcaatttaagtaaagatgaatataacgagcgacgtgcaaaaatctcaactaaacgcaccgaaatctattacagcgaagaaatcaaacacgacaagaagatgattatgatacgtgagttgataatgggtgctatgctaggaactaactatcaagaacaagaggtacaactcgtattaaatgaattactaatggaaatcagaggtaagctgtactttcatcaaatgacccgcccactaaggtgtactaggaatgattaa

SEQ ID NO: 339 - DNA, 231 bp, Asteriusvirus sp.
  source 1..231: mol_type = genomic DNA
atgaaaatgattaatttaacttaccatgaatatcaaaaacgtttaaatgcatccagagatataaggattcaaatattcaataacaaaagattgaagcctgatatcaggaaaatcaaaatcatagaagcagagttgtgcaactttctagggacgaactatcaggcaggtaaggtaaaaaactatcttaaagaactcatgaatagtattgaaaataaatgtaagggtaattaa

SEQ ID NO: 340 - DNA, 219 bp, Asteriusvirus sp.
  source 1..219: mol_type = genomic DNA
atgcaaatgattaatttaagtaaagacgaattttatgttatactggcgaaaacttatccagcacgtaaggccgtttatgatagtcacattattgaaccctcaaagaagttgattttagtaaatgagataaagatgctttcagtcttaggaacaaactatcaagagaatgcggtactgatgttaattgatgccctccagcgagaggttaaacgtaaatga

SEQ ID NO: 341 - DNA, 219 bp, Asteriusvirus sp.
  source 1..219: mol_type = genomic DNA
atgagaaaattaataggtttcgaatatgttaagcttctacaaacctgtggaatcagaaggagaatgattcaaaaggataaaagaattgccgaagaacgaaagtatataatgataactgaactttatgtcttaacactcttaggcacaaactatcaacacacttatgtagatctatggattgacgctctacagaaagaggttaaaagtaaatgcaaatga

SEQ ID NO: 342 - DNA, 216 bp, Asteriusvirus sp.
  source 1..216: mol_type = genomic DNA
atgaaaatcctgactgagcatgagtattacaataggttaagaactatacaaggaaaagtctcgtggacttttttagataattctattgcagaagcggaccgatgtgttataatagctgaaatgaagctattactcttcattgggacaaactatcaaagtatctacatagacgcatggttaagcagcttacgtctgaagtcggtgagtttaaaatga

SEQ ID NO: 343 - DNA, 252 bp, Asteriusvirus sp.
  source 1..252: mol_type = genomic DNA
atgcgacaaagactaaatcacaaaatgtattttaaactattacagaatctaggacaaaaacactatgatacagtatctgaaatattaccctatgatatcatgcgtttaattcatagtgaggcagagatgcttgtactgatgacaggcactgataaaacagcaattaccaaatctatagatatgttcatcgatgcacactgccaacacattagaaccgagatatggagacgtgagaatgaaaatcctgactga

SEQ ID NO: 344 - DNA, 252 bp, Asteriusvirus sp.
  source 1..252: mol_type = genomic DNA
atgaagactttatcaagcactgagtatcagactgccctcttctctcttcttaacacccttagaaaaaacaatgccttacatggtgcacctgaagtggatgttatcaacggtgaactttatcttatgaaattcattggaacaaactatcaagatctgttcattcaacgatacctggcagcattgagaaacgaaatatcagataaaacccgccaagccagaagagaatggaagaaacaatgcgacaaagactaa

SEQ ID NO: 345 - DNA, 258 bp, Asteriusvirus sp.
  source 1..258: mol_type = genomic DNA
atgaaacacttaacacaagatgaatattcacttagaattcgaaagctcaccccagaagcaagagtaatctacgatgacggtgaactttcatggaacgagatgaaagtgaaagttcatgagctatggttgctgtactttattgggactcaatatcaagagaaatattgtaccgattatcttgaacaactaatggatcttatacagataaaactaaatgaacgaattgtggaaaaatatgaagactttatcaagcactga

SEQ ID NO: 346 - DNA, 159 bp, Asteriusvirus sp.
  source 1..159: mol_type = genomic DNA
atggttttcattaacatatctgaccaactcgatactaaactaaaagtcgagaagagtgagggatggatgctgtactttcttggaacttctcatcagaatttttatatccatgaacacatagttgcactcacaaatctaataagggataaatgtaaatga

SEQ ID NO: 347 - DNA, 147 bp, Asteriusvirus sp.
  source 1..147: mol_type = genomic DNA
atgatgtacttacaatggactgaaattgaagaaaaggttgctgaagtatggatgttggaattcatggggacgcagtatcagaataggtttgcgggtgagtatatcaatgttcttatgaaacaaatagaaagaaaggaaaagaactaa

SEQ ID NO: 348 - DNA, 228 bp, Asteriusvirus sp.
  source 1..228: mol_type = genomic DNA
atgaaacatttaagtaatatagagaagaataaaattatcattgctgtaataaacaaatattttacacttccacaaaaagaatgtttatctataagggaacacaggataaacaccaccgagattcgcatgttggctgtactggggacaaactatcaggaaggttatgttcatgagcacatagttgcactcactaattacataatggacaaatgtaatgaacatcattaa

SEQ ID NO: 349 - DNA, 216 bp, Asteriusvirus sp.
  source 1..216: mol_type = genomic DNA
atgattattctagaaaaatcatatcaatatactgaacgcatcgctgccagacaacttgaaatcctcataatatacgaagagacttctgatttaaacttagccgaggtattggaaaatgaaatacttttgggtgcattcttgggaacagactatcaggagtattatgaggaaaagtatttgtcatctcttgagaaatacgtcaggagcaaactatga

SEQ ID NO: 350 - DNA, 213 bp, Asteriusvirus sp.
  source 1..213: mol_type = genomic DNA
atgattatattaacacctgaagaatataagaaacgttttaaatctgtccaggctgaaatattacttatatacctttcaaatgcagatcttaacttatcaagggtaatggagaaggatttacttatgggtgcatttttggatacagactttcaggagtattatgtaggggaatactttattgcacttcagaaccacattaagagtaaactatga

SEQ ID NO: 351 - DNA, 210 bp, Asteriusvirus sp.
  source 1..210: mol_type = genomic DNA
atgaaaactataacacgaacccaatcattcggacttatcttgaaatacatggacttaatggtggatatcagcaaagacctgcctaaaactgcaattgaagttgcaagagcagagatccgcatgttggctgtactgaacacaaaccatcaggaagagtatgttgacgattggattcgatttttaatagaagatattaagagtaaactatga

SEQ ID NO: 352 - DNA, 201 bp, Asteriusvirus sp.
  source 1..201: mol_type = genomic DNA
atgaaaatgcgtaaattaaccgaaaaagaatatcaatcactgttacgtaaaaactacgtaaagatttacaatacagacacacacgtagaacgaatggagttataccttttgattacattgggaactaactatcaggatgcatgggtgattcaatatatggatgcattgaaaaatgaaatattgtccacgaggaaacaatga

SEQ ID NO: 353 - DNA, 228 bp, Asteriusvirus sp.
  source 1..228: mol_type = genomic DNA
atgattgatattattttcaagggagtccctatgcgtattttaactcaagcagaacaccacgaaagacttatcaataacatggctatgataatgtataagtcacatgaacgtggtattgcctataagcgtgaattaattatggcactattcattggaactaactttcaggaaaggtatgtcaaggattggatttggtatttaattgaagatgtaacgagtaaactatga

SEQ ID NO: 354 - DNA, 210 bp, Asteriusvirus sp.
  source 1..210: mol_type = genomic DNA
atgttctatacagtatacagcgttctaggtacgattgctggcgtacatgataacgtcgatgatgctatgcgtacagtactaacacaagtccccctcaagcctaagactgttaagcagatgacagcacgactaaccagggcgacggatggcgtggaagtatggcaggactacggggatacacagataatcgttagcgtaacgaaggattaa

SEQ ID NO: 355 - DNA, 402 bp, Asteriusvirus sp.
  source 1..402: mol_type = genomic DNA
atgaccttctcaatcacttccttcgctgacgttttagtactggctcggacttttggtaaagatgcactggagtacgctgtaagtaatggcactctccaaccggaacaatgccgcatcattggaaactgtaaacgttgggcggtatccaatactattgcactagaaaacttcaacgatggtaacaatgagtattcagttgatgcagtattcgaagccgttgatcttggcggtatctataacactaacctaaatgatgtgcgtatcgttcgcacggggttcggtgcttatgatgtatctatccgtgaagctatgaacaccggatacattagtaaggacttacttgctcacatcatgcagctatggactgaacgtaacgaagcacgcactatcttaggactataa

SEQ ID NO: 356 - DNA, 327 bp, Asteriusvirus sp.
  source 1..327: mol_type = genomic DNA
atgagtacttcaatcgctatcgttaaagctttcatccgtaccaatttcgaccgcattactgttgatggtaatgatcgggaagtagaatactctttcattgttgcacaaaccgcaaacggtgcacgctatatcttaaacgatagtgaagctaaccactacttctataataaaggattacactacatccctagcgaagtagtctacagtaagatgaataagctggtagacaagattaacgctaaaggtactatcgatttacagtactggaccgaaaccgatccagaatacggatcacatcgttacctgaatccaggaattaaaatgtaa

SEQ ID NO: 357 - DNA, 132 bp, Asteriusvirus sp.
  source 1..132: mol_type = genomic DNA
atgaagctcctaactttgtgggccgtcgcaccattgccgccctacgagatacattattgcagtactgctatactttgtcaatacttttttgaaatagttttgagtactggaattacatccaccagcagatag

SEQ ID NO: 358 - DNA, 201 bp, Asteriusvirus sp.
  source 1..201: mol_type = genomic DNA
atgtcaatcgctaacgaattggttgcagtactgaatgaagcaaaagccaaccttatcgatgtacagattaaggaattacaaaacggcttaatcggctgtacttgtaccgctggtggagcggcagactatcgagaacacgaatcactcgaatcactggtacggtatattaaaatcctggtagaagattggagaatcatctaa

SEQ ID NO: 359 - DNA, 258 bp, Asteriusvirus sp.
  source 1..258: mol_type = genomic DNA
atggaacaattcaaaacgtatcgggtaaatccaatcgctacagcctacgtagaagaccataaaacattaccagtacagacaccaatcaaaggccatatctatcgtgctatgcagtggaataacgcctataatggctataaagcggtagcggctgcaatgtacttaggggatggcgaatggtttgatccaaataatcctggtgcactagatagtactgaaaaaatgacatgggccgactatatcgaagatatctcataa

SEQ ID NO: 360 - DNA, 225 bp, Asteriusvirus sp.
  source 1..225: mol_type = genomic DNA
atggctaactttgatgaactgatgcgggaagtagctaccctggcagaagagaagaaatcatttgattctatctataacaccgcttacagtgattcagtactggcatgtactcaggatcaaaaagatgaactgatcgccacctatcatgaagcatggaagtattaccgccaatgggagaaagaagaaagcgagtctaccatcaacggcatcaataatctaatctaa

SEQ ID NO: 361 - DNA, 192 bp, Asteriusvirus sp.
  source 1..192: mol_type = genomic DNA
atgacagtagaagaagttaaaaaagtactggcagtactacgctatcataatcattgtaaggtgaagaatgatcctgattatcttgattcatcgctggaagaggatacactacaagcaataagccatatgcaaaaaatgcttaagcgtatgaccgaaaagaacaggccggactatatcggaaataaaatttaa

SEQ ID NO: 362 - DNA, 273 bp, Asteriusvirus sp.
  source 1..273: mol_type = genomic DNA
atgtccagctactccgctactatgattattaaagatatgaacggtaatcctacttctgctggtggatcatttggtaacattaacttagatggtcggttatcaattgaatcagccatcaatgccgcgaaagaagtttttaagaatgaatgtactgtaagcaagctggattatatgggcttcgctatcgagaaaactaatcgttttgtggactacaaaaaaccactgatgatcgatactaacctgaaagctaacgaagtggaatacttattatga

SEQ ID NO: 363 - DNA, 255 bp, Asteriusvirus sp.
  source 1..255: mol_type = genomic DNA
atggttctccctggtacattaaggaataaaatcatgactacgatgacttgcgttcacgcttcaaatcttctgaatgatgcagcatttaaagcaggtgaagaatatcaatgctatcgggatgaaaataaaaaagttttcgtcgttgatgctaacggtttccatattgaattacaatccggcttcactggtgttgatggtaaatcagtatggggcgtacaggatgataacggtacatatcattttaaacgtaattaa

SEQ ID NO: 364 - DNA, 102 bp, Asteriusvirus sp.
  source 1..102: mol_type = genomic DNA
ttgactccagtcagtccctttgctattatatattcattgagagataactcactgacccatagggtgcggaagtgtatctattatataagtattcagtactga

SEQ ID NO: 365 - DNA, 585 bp, Asteriusvirus sp.
  source 1..585: mol_type = genomic DNA
atgcgtaactatactaaattcatccgttcacttcatgcaatggaaactaataaagagatccttacagcttgtcggttagctggtctggagatcgtcggtgctggttcttcccgtattgtattcgctttaaatgatcggttagtgattaaggtcgctaatagtgatgctggcgtagatcaaaatgaaactgaatgtaaggtatggaattttttagattatgaccgtccgcaccttaaacagtactttgcaaaggtgcatatgcatttatgcgatcctgataatctgtttattgttatggatcgtttgagtactgcaagcaaaggtagtgcaaagcacataacggcctgtaatgaattaaagtacaatgctaaacgtaaaactattgaacgccaacaccattttgccgatgcactacaacacgtcgatgatacattatcaacactaacgatcattgatatcagcaagacgaacataggccaggatcgcaacggcttgattaaagtacttgattacggtttaacccgcaatatctggaatcagtactataaaaagcgtgatgtaaaaaccgtaacaataacacgataa

SEQ ID NO: 366 - DNA, 243 bp, Asteriusvirus sp.
  source 1..243: mol_type = genomic DNA
atgattactttagaaaaacgtatcaaagagactacaacgctggtggaactgttaaccgttcttaaatgccgggtaactccattcagtacaccggactttatcaacatggtggacgttttcggtcgctatcgtattacggtcgaacaaggtacggcaaaagtattcagtactaaaaatacgcgtgaagtattccacgcagttcaagtaaaaaaagtagttgccattgatagtaaagtactgtaa

SEQ ID NO: 367 - DNA, 255 bp, Asteriusvirus sp.
  source 1..255: mol_type = genomic DNA
atgattaaggttcaactatcaaacgataatgtattacgggtacactataaagccccacagagaatcatcacaaaggccgtacagcttgctaatgagtttattaatggtagtctattacccaggaagttaagcaacgggaaactacgtgttatcgatgtagacactaacaatagaatagtgatagagagtactggaaaaattaatctatatgaacaccaacaatacaataaaaaaataaaactaatatcacgttga

SEQ ID NO: 368 - DNA, 396 bp, Asteriusvirus sp.
  source 1..396: mol_type = genomic DNA
atgattactaaattcttcgctacccgtgaacaagctcgcatcgttgctcgtgaagaaggtgaaacatttaaagacatgggcaaagatgcaccgaaaggacaacgctgggcggtacagttcaaagagatctctgatattgtgaattcacctgaaccagtacttactgaagcagaactgaagaaagctcaagaactggctgaagtactgaacgctcaagatgacttcttgaaaggttctgatattcaagtacaagtgaatagtaatgcatggactcacgcggatcacctggcaaaccttaagcgtccaagtgaactgattcgtaaccagaaagagatccgtcatgaccgtaaaggaaaccgtgtaacagtatacagtaaacgccgccaggttatctaa

SEQ ID NO: 369 - DNA, 324 bp, Asteriusvirus sp.
  source 1..324: mol_type = genomic DNA
atggctatgatccttacccagaaagtagaaatgaaaattgtaacttcctttgacattaaagttaatcggtggactgatagccacggcaatacttaccactcatgctacgtgtctgcattgattggtgaccgctgggaagacctgggacatgaaacctttacttacggttacggtacacaaggcgaatacacgggcttggagatcattaaagaaactgtaataggtttcaacccgaaagagaaagtactacaccacattgagaaagagatcaacaaagaaattacagttcgttactacgatgtaaaacgtaagaaagacatgtaa

SEQ ID NO: 370 - DNA, 135 bp, Asteriusvirus sp.
  source 1..135: mol_type = genomic DNA
atgaaagcagcaaacaacactaaaaaagcaaccaatcccctggctggatggaagttagatttatccgatgaagtggtttgcacaaatcgtaatgtagttgaagctgaaaagaaattacgaaaagaaaacaaataa

SEQ ID NO: 371 - DNA, 96 bp, Asteriusvirus sp.
  source 1..96: mol_type = genomic DNA
atgtattacatcaggacggggaacgaaacaagtaactccccgttaagtagtccaggagtaagacatacgaaaacctcccctgataaaatagtttga

SEQ ID NO: 372 - DNA, 159 bp, Asteriusvirus sp.
  source 1..159: mol_type = genomic DNA
atgatatggtacaaaaatactgataatggtaatttttatcgtataaaaaacaataatgtattattccgtagggattctggtatgtgggcaaaacatgatagtttaaccccgcatgatcttacattgccaccgttcaagcctgttaatatgagtaagtaa

SEQ ID NO: 373 - DNA, 102 bp, Asteriusvirus sp.
  source 1..102: mol_type = genomic DNA
atgcatagaaacaaatcagcccacagggtgcataaatgtatctattatatgctggtggctagtactatcaagtacttgcaaagtatcacgataagcgtataa

SEQ ID NO: 374 - DNA, 150 bp, Asteriusvirus sp.
  source 1..150: mol_type = genomic DNA
atgaaagaatttttattcgaagtagtgtttcaaggtgtcggtagtaaccaactgattcgctcaagtggttataatgttaaccaggcatggaataacattaaacaaatgtacccgaacgctatcacatatcgcaacccaaaacaagtttaa

SEQ ID NO: 375 - DNA, 171 bp, Asteriusvirus sp.
  source 1..171: mol_type = genomic DNA
atgatccaagtagaattatcagtactgaaagatctgttttatcggttaggcactactggcgaataccctaaaggggatactgctaaactatacattgcattggatgtatggcaacgtaatgaactggctaacgcctggcgtaaaggtaaatcagaggggattgcagcatga

SEQ ID NO: 376 - DNA, 93 bp, Asteriusvirus sp.
  source 1..93: mol_type = genomic DNA
atgcaaatgaatccgatgattgttgtgttagctgtacttatgatcattcatgccatcgtagaagtactaacacaatcaggagtaatacaatga

SEQ ID NO: 377 - DNA, 213 bp, Asteriusvirus sp.
  source 1..213: mol_type = genomic DNA
atgcaaggtcaactaatcgttcgtaaatggtctgatactaacgaaaaaccgtgggatgttcaatatatcggaccggacggtgtttcacgttatcaacctggcgtaacgcatagtactgagcaatatgccgccgctcaccgcgaacgcctgttagaatctatgaaacagggattctgtgaaaaattcattcaagatcattggctgaaagattaa

SEQ ID NO: 378 - DNA, 324 bp, Asteriusvirus sp.
  source 1..324: mol_type = genomic DNA
atgtacattcatactactatcacaaaagaagttcgttgtcaattcgaaagtatccctggtgtatgtttcattacaggcactttctcacctggtgaccgtgataatccagtactgttacagttacgccatccattatgggataaagcatttgatctgccgttgaatgaattcgcaaccactgctgataagtacattaaaaatattcgcgagaatgattgcctattcattaatgcttttagtgatgccgcgttaagtgagatccatgctgtattggttgcaatcatggaatcaatggagaaaactaatttcaaacaaggtgaataa

SEQ ID NO: 379 - DNA, 189 bp, Asteriusvirus sp.
  source 1..189: mol_type = genomic DNA
atggaaaacttatcaagcattttagtacaagatgatttcggtaatcctggaagtgctatcattgttcggggtaataaagcaacgtttgttattgctggtggacctgtacagcgtagcattaaaaacaatgcagttacaatcaataatgttcgctatcgcttagataaagaattgattcataaactgtaa

SEQ ID NO: 380 - DNA, 357 bp, Asteriusvirus sp.
  source 1..357: mol_type = genomic DNA
atgggtatacaacatatcacgcgtactactgacaatggtgagatcactggctatcaagtacaaggcaaagtagcacaattgcagtactggtttgttaaacgtggcattgttgcacctgagcttgattatgatcgtgtagcgtttattgattctctttatgttgatcccgataatcgcggtaacggtgaaggtactgaattaatgaatgcctttattgatgccgccgatgattcagattgtatcatcttagaatgcgatacgggagaagataacgagtttaatcttaaagaatggtatgaaagttttggttttgaagtactgattaactgtgaatatcctataatgattttatcctag

SEQ ID NO: 381 - DNA, 258 bp, Asteriusvirus sp.
  source 1..258: mol_type = genomic DNA
atggctgtaggattcacgaaagatggggccgagcaagacgagattaacgcagtgattcaggtcgctgttaaccacgctagaacgcaaattaacgcacaaatagaatcactgatacattgcctcgactgcggcgataaaatccctgagaatcgccgccaggccgttaaggggtgtaagtactgcatcacttgccaggctgatcatgatagcatattcaaacgcaatccgcgtaattgttggcatagatctatgagataa

SEQ ID NO: 382 - DNA, 117 bp, Asteriusvirus sp.
  source 1..117: mol_type = genomic DNA
gtgatccgcacatatggggatgaatatgtcgtgtcgtatggattggaaaaagtaaaaacaagtaatatacttgtcgcgttacagtactatagtaattttataatgaggttaaaataa

SEQ ID NO: 383 - DNA, 171 bp, Asteriusvirus sp.
  source 1..171: mol_type = genomic DNA
atgtgcggatcaccacaccatgaaaatttttatacacttccactactaatcataacctttcgtctaaccaactgcatagaattatactactttacgcaaattgatcaagtattgatcagatcattttttgatcaatattatacagttacatttgtgcaccctatgggttag

SEQ ID NO: 384 - DNA, 198 bp, Asteriusvirus sp.
  source 1..198: mol_type = genomic DNA
atgattagcatgaaatcagtacaaaaacaaatagaaacattatcaaaaattaaacgtaaacagtactccttagaatatacaatcaatggtaactatcatctaatgaaagaaaataattttatagtcattgatgaatcattgcaaatcattagtatagtactgaaagcattaatcaatgacagaaaaaagttaaaataa

SEQ ID NO: 385 - DNA, 144 bp, Asteriusvirus sp.
  source 1..144: mol_type = genomic DNA
atgacagcattagattcattcatcgacgcagtactggcaaaaactggcgaggatctgaccgcagaacaatacgcgatgatcgagcaatgtcagcaagacggtaaatcggtgaaagatactgttaagattatccgcaagatgtaa

SEQ ID NO: 386 - DNA, 180 bp, Asteriusvirus sp.
  source 1..180: mol_type = genomic DNA
atggctattatcgcaaaaactgaaatcatcggcctggattctatcatcatgacgtttgaagatcaaaaagggatgtatgtagtttcctatggtgattatgttcgggagtatgaaacggtagacgaagcctttgaaagttacattcgccaggttaataaagcatacgacgattaccgctaa

SEQ ID NO: 387 - DNA, 213 bp, Asteriusvirus sp.
  source 1..213: mol_type = genomic DNA
atggctaatatccgcactgtactgaaaaatgcaaaacaagttttattttctgatcatgaaaatttcaacaaggatatcactggcgttcggaatatcaaagatgtaaaaaatgttatgggtatctattgcaatatgaaacgtgttggcacgttcggcgataaagtactataccaggcaggggattacaattttacactgactatcattaactaa

SEQ ID NO: 388 - DNA, 342 bp, Asteriusvirus sp.
  source 1..342: mol_type = genomic DNA
atgactattgcaattgctcaatctaactttgaaaacgaaatcatcgctcaggcactgcgtttaaatgatggtcgggccgaaatcaattacggtttcaatagtggtggatgtgaaaaatatcagtactttgtaacggctgatggctgtgtcctgggtatcaatacagttattgtaaacattcagaaaattaatttcaataatccagacgatagccagttttacattgtcggcgtagacgtgaactatgaggatgactcactaactgatgatcacactggcgagaagttagaaagtgcatacggtgaagatgattatcagtccggtccagaagatttcgaataa

SEQ ID NO: 389 - DNA, 102 bp, Asteriusvirus sp.
  source 1..102: mol_type = genomic DNA
ttgacttcggtcagccattttgctattatatattcattgagagatagctcactagcccacagggtgcaggagtgtatctattgtataatgattgagtactga

SEQ ID NO: 390 - DNA, 138 bp, Asteriusvirus sp.
  source 1..138: mol_type = genomic DNA
atgaatccaaataatattatctatcataacgctaaaacgaaagcagataaggtaaacgcaaaaaaagcgaaagtaaagcagtacatcaagcaaggcatgacacgcaaagcggcattgcttaaagctaaaaataaatga

SEQ ID NO: 391 - DNA, 90 bp, Asteriusvirus sp.
  source 1..90: mol_type = genomic DNA
atgaaaacattagcttactatagttcggccctagtcggtgcagtactggcggctttattagtaacctatctattctttatggtgatttaa

SEQ ID NO: 392 - DNA, 153 bp, Asteriusvirus sp.
  source 1..153: mol_type = genomic DNA
atgaaacaatataacgctcggtttgatgttactatcggtaacgggaaaggtcagtactctttcagtactcgtaagagttatacagaaaacttcctgcgtaattgtgcacttaccgccgcacaaattaaacattactttcaggctaaaaaatga

SEQ ID NO: 393 - DNA, 207 bp, Asteriusvirus sp.
  source 1..207: mol_type = genomic DNA
atgcttactgtacaggataagatagacatcttaaaggttaatatgtatgtgattgatgcagatcctgaaaaagtatttgcatacgatgattctaatcgtagtcctttttattgtagtcatgaagttggtaaagtgccgctagattatgttattgaaagagtagttgattcagcttataaacattacttagaaagtacttgcaattag

SEQ ID NO: 394 - DNA, 171 bp, Asteriusvirus sp.
  source 1..171: mol_type = genomic DNA
atgaacgttaatcaagtactgaatgaagttgaaagcatcattaaaccaatgaaacgtattgatgctgttcctacaccggaagaatgccgcctttatgagcgttacagtgtggaacaagcccaggaaatggcccgtatccgtccggttgccagtactgataaggcggcgtaa

SEQ ID NO: 395 - DNA, 270 bp, Asteriusvirus sp.
  source 1..270: mol_type = genomic DNA
atgaaaaatatcagtactttaatcgatgcaggtactcatgttcgtcggtctatggttgcaaccagtactacaaaacaagtagcaagcggttatcttgtatttgttcacgatggtaaactcctggaacgttcaatcaattttgatgttaaaaacaattgccgttttattatttttaagcgtgaacaatataaaattgatttgccagcaaagcccattagcggggcgtacaacgtgcaatcattgtttgagcgtcaaccatacacctattaa

SEQ ID NO: 396 - DNA, 324 bp, Asteriusvirus sp.
  source 1..324: mol_type = genomic DNA
atggctaaaactatcattaacaccgtttccctggctgcaatccatgcaatcaatgttgacggtaaacgttggactgattcatatggcaatacttatcattcttgtcatgtaagcgttgaactggataacggtttgaatgatctggcggttgaatcatttacttatggctatgaagatgcatatcaacaaacggcgttatctctcttaaaggaatcagtagacgggcttaatactgatgaaacctcccttactcgtgtgtgcaatgatcttaatatcccgttgcattgtactgtacagaatgttaaacgcaaaaaagatctttaa

SEQ ID NO: 397 - DNA, 144 bp, Asteriusvirus sp.
  source 1..144: mol_type = genomic DNA
atgaaaacttgtcaatgtggtaaaaaatctattactggtttaaagcggggcgttgctctttgtcagtatcactataatgctcaagtatggggtaaagagtgggccgaccaggtggaagctgtaaagaaagcaaaaagtaagtaa

SEQ ID NO: 398 - DNA, 228 bp, Asteriusvirus sp.
  source 1..228: mol_type = genomic DNA
atggctatcgtaatcactcgcgtatctggtactactggcaattcttctactgttgctgtaattactaataagaaaggtgcggaattacattttgcaatgaatacctgggcggtgaatgagttcggtcagtgggctagtgtagaatacattgaaacctatcaagtgccaaccattagcttaacggatctcggcgtagatcgtatcttatgcctggatgaattaaactaa

SEQ ID NO: 399 - DNA, 153 bp, Asteriusvirus sp.
  source 1..153: mol_type = genomic DNA
atgaatacttatgaactggattgtttcacgttacaagtaatgtcagtatgcagcaagaaagattggtcatcaaaggaatttaaagcagttattgcgtgtgcaaaacacggcaagactatcaatgaaacggcatcaatcattgataaactttaa

SEQ ID NO: 400 - DNA, 93 bp, Asteriusvirus sp.
  source 1..93: mol_type = genomic DNA
ttgcaaaatactttaaacgtcctcaatcgcattctaacggccttaactccaccagctagggcgatgcatcagataatcagtttaatgcgttag

SEQ ID NO: 401 - DNA, 483 bp, Asteriusvirus sp.
  source 1..483: mol_type = genomic DNA
atggctaatgtaaaatcatttctgaaagcactgatttctaacgatactgttattgctgctgaattgctggctgacctggataatgataccatgaaagcagtacgcaacaattttaacattgcttacagtgaagcgaaagaactacaagccaaaaaggtagcagaactggaagaacagaaaaaagcccgtgaagcagaactgcaagcaacaatagaaagtattcaggcggcggtgtctggtttagatctggaagtggtgattgaaatggcacataaagccctggcggttaagtacggtgaagataagccggaatctaagcctaaaaaatggattcaagaacgtgttacggttgtccttgataacggggaagaacatttgattcctgtacgcggtaactgcattgcggtagtactggatgcaatcaaagaaagcggtatgactcgcgaggaatggatcgaagctcaccgcaaagttgaagcataa

SEQ ID NO: 402 - DNA, 123 bp, Asteriusvirus sp.
  source 1..123: mol_type = genomic DNA
gtgggctttttttattgtagtattgtagtactggtatactttgaaaatagttttaaaaaagtagttgacattaccagggaaaagcgtagaatgtattacatcaagacggggaacattaagtag

SEQ ID NO: 403 - DNA, 300 bp, Asteriusvirus sp.
  source 1..300: mol_type = genomic DNA
atgaaaactgcaatcatcgccctggctttatctgtttcctctttcgctgttaacgcttccgttgatgtaccgaaagaaaaattcattcagtgcactgttgcaatgactaacgaggaaacggctgagatcgttaccaaatccctggaactggcccctgcaatgtttgctaatggcccgtaccatgaagaagatgatcagggtagcacgaccatctattacgatgcaaaaagtaaacgcggttctgtcactgtaatggatacagagaaagttacattcactggcgtaattaattgtttataa

SEQ ID NO: 404 - DNA, 114 bp, Asteriusvirus sp.
  source 1..114: mol_type = genomic DNA
gtgactatctcgtctttatgtagatattatgccagtactggatgcagttgtcaagactttttttcaaatacttttatattaaagtacttgataatagtttttaaacgcgtataa

SEQ ID NO: 405 - DNA, 222 bp, Asteriusvirus sp.
  source 1..222: mol_type = genomic DNA
atggctaatatcactactctttcccaactggaagcactggttaaatctatgcgggaacatgctgacaatatcggcgtagaagatccggctgtatgtttttgtgacgaaataaatgatgatacgctcgtcattgcagaagtacaagacgtttctaactattcatcgcgttacacttgcggagtatcaaagaaaggtgatttttgtttataccttactaagtaa

SEQ ID NO: 406 - DNA, 189 bp, Asteriusvirus sp.
  source 1..189: mol_type = genomic DNA
atgtttaatattttaattgtaaatgagcaaggtaacgagattgaaacaattcaatccccaattagtccgattggtactcatagcatcgtaacggaaaaagcggtatacgattgtatcgagttcgcagttgactacaagaaaaatcagattgttgtgcacgttgaaaatgattttatggaatttaattaa

SEQ ID NO: 407 - DNA, 213 bp, Asteriusvirus sp.
  source 1..213: mol_type = genomic DNA
atgagtgatttaattgaacgtatcaaagagcttgaagaaaaagaattgcagttaatcgggttacagaataaagtattccatgatttaggtggcttcattaatgcctgggatagtggcgatcctgatgcgttacctgctaaccgccaggcgatgatcaatgatgtgcgtggtgtctttgattatgttttaaaagtactagacactaagcaataa

SEQ ID NO: 408 - DNA, 285 bp, Asteriusvirus sp.
  source 1..285: mol_type = genomic DNA
atgagtaaagtaattaactatacagtactaagcaagtcattatctattagccagtgcaccgatggtttttggctgtacgatgaaacgcgtggcatgaatttagctatgcaggagaaaactgctgatgcggcatatcttaaagcactggaatactaccagaagcgtttaaaggaagtagaaaacgattataataacctgaaagcgaaagtagatcatttcgtcggtcaattcattgacgatgacgaggacgggcactactgcgaccgttgcggatcttacaattga

SEQ ID NO: 409 - DNA, 240 bp, Asteriusvirus sp.
  source 1..240: mol_type = genomic DNA
atggctactactaaaacatacaacggtcacaaaaacaaaactcattggaatgtttcattgtggattaataacggtgagtcattgtatcggcttgctcaaagttgcatcgcacaaagtaaaactaaagatattgctgcggaatgtatgtaccgcagattaaaagccaacggtactacaacaacgccggacggctttaagtatagtactactgcaattcgtgccgcaatggttggaatgtaa

SEQ ID NO: 410 - DNA, 237 bp, Asteriusvirus sp.
  source 1..237: mol_type = genomic DNA
atgatcgaacaaatcaaaactacaacgccaaacgtaacgggtacagtatcacacttcattggtgacgattcgcggggcgttccttattgtgcggtacatgtaaacaaaaatggcgactactggctaacggtttacggttcttattctttcgggcgtagtgcacaccaaaagatcctggataaagtacaaccaacgggtaaaaatatcaccgctgagatgttttataaaaagcactaa

SEQ ID NO: 411 - DNA, 612 bp, Asteriusvirus sp.
  source 1..612: mol_type = genomic DNA
atgaaaactatcactaccactacttttgttatggctttttctgaactgaacgcagaacaacaaacggcggctattgaactggttcgggatcgtgagcgttcatgtgaggataatttctttgctgaatcagtactggaatactataaagaaacagtactgccagaatacggcatagatgaagctgaattgcaatacagtggtttttggtcgcaaggtgacggtgcatcaatcagtactgaccacgttgacgctgagaagtttttacgcaaggttaaggcgttaacgaaatatcgttccatccgtcacctgttgaacgaagatgatttggaaatgagtgtagaacgttcccaatcgcgttatgcacacgaaaacacggtaggcggttgcgttgatactcgctacactgatttaactgtaaaacaggctgcattagctgaggatctggaaaacttactgactgatactatccgagaattatcttgtaagctgtaccgtgatttagaaaatgcttatgaagaccagtttactactgaaaacattgtaggactgattgagggtaacgaatatcaatttaatgttatcgatggtgtagtagaatctatcgcatattaa

SEQ ID NO: 412 - DNA, 96 bp, Asteriusvirus sp.
  source 1..96: mol_type = genomic DNA
atgttttacatcaggacggggaacgaaataagtaactccctgttaagtagtccaggagtaagacgtatgaaaaactcccctgataaaatagtttga

SEQ ID NO: 413 - DNA, 171 bp, Asteriusvirus sp.
  source 1..171: mol_type = genomic DNA
atgtatctattgaaacgaacaatttggcccacggggtgcgggagtgtatctatagaaaaagtagtttattacagttacaattgtgcacccggtgggttagctgttgtcatggggtatattatgccagtacttgataatgctgtcaatactttttttactattcagtactga

SEQ ID NO: 414 - DNA, 231 bp, Asteriusvirus sp.
  source 1..231: mol_type = genomic DNA
atgactaatatgtatatgactgaagttaaaaccgtaaaagatactaccacgaataaaactacttacttacagcggatctgcggtgtatggcaacgtatcagcaaatcaaagtactttaaattaacatcatatgccaatcgttcggattcattcagtactgaaataaaaggtaataaagtacaccaatacggcacttattattattatagcctggacgcgattgcagtataa

SEQ ID NO: 415 - DNA, 267 bp, Asteriusvirus sp.
  source 1..267: mol_type = genomic DNA
atgactattacatattttgcaacgcgtgaacttgctcggattgctgcacgccaggacggggcgacgtttaaagatatgggcgtacattctgaacgtggtaaacgttgggccgtagtaaagcaaagtaccgccagatcgatccagtactggcgagcggctttaaagcgtcctgatagtgtatcgcgtcgcgtggtagaaataaagcacgaccgcaagggcaatcgcgttaccgtgtaccgtactaaaaagattgcagtacttgaataa

SEQ ID NO: 416 - DNA, 240 bp, Asteriusvirus sp.
  source 1..240: mol_type = genomic DNA
atggctaaatcaaaaatgttcttaggacacaaaaacaaaactcaatggaatgtaagcctttggattaataacgacgaatcattataccggttggcccaggactttattgccgcaaacactaatcgtaatgatgcggcccgtcatatgatgctatttttagaacagactggacaagataaaactccagacggctttaagtatagcactactgcgatccgtgcggcgatggttggaatgtaa

SEQ ID NO: 417 - DNA, 363 bp, Asteriusvirus sp.
  source 1..363: mol_type = genomic DNA
atggcgactcaaatcactaaaatcatgcttaacctggtaaacttccgcgaagagatgaaaggtcttccggctgaaactgtaaaaattcacattgcagcttatcgggaacttattgcaatgttgccgcttaagcgtgaacagtacgccgctactgcaatgctggatgcaatgatccatataatgatctcaaatgatttaacgatggtttatcagtacatgggcgaaaatttcgcggtgtgtagtaagccagtaccagggatggcaactactgaggaattgcacggtttaaatttaaaacaagatgcatgggataatatgcatcgtttcctggtatgggctgacagtggcaaaatttacaaataa

SEQ ID NO: 418 - DNA, 297 bp, Asteriusvirus sp.
  source 1..297: mol_type = genomic DNA
atgtgtagtgggaagtgttcccgctctcgatgtaaaacattatacgcctttaaacatagtttgcaagtactttctacatgtacttttaaaatagttttctttctatataggagtactggaacaatccagggagaacaatctttcagtactgaatcagtactataccccgtaaaacgtcctcaatcgcattctaacgcattaatacacctaagctatacatttgcaccgccaccagctaaccagggctttacgggccgtttaaacgcgttaaattattttcaattattttgtttttag

SEQ ID NO: 419 - DNA, 147 bp, Asteriusvirus sp.
  source 1..147: mol_type = genomic DNA
gtgcggaattacgcccaaaattcagtaaatttaaaaaggatacactcccgcaccttagcaggtcatagcactttctcagtactgaatcatagtaccatagtacgccccaggatggcaagcaaaataattaaaactttttgcatttaa

SEQ ID NO: 420 - DNA, 114 bp, Asteriusvirus sp.
  source 1..114: mol_type = genomic DNA
gtgcatagttacgcccaaaattcagtactagattattttttaaaattattcatccaggcggttgacattgcccccagtttattagataatgattccagattcagaaaaatctaa

SEQ ID NO: 421 - DNA, 93 bp, Asteriusvirus sp.
  source 1..93: mol_type = genomic DNA
atgtatagacggctaaatcaaaatttttattctgttttttccaatagttaccctaccgcgttgggatggtttccccgcagtatctggagttag

SEQ ID NO: 422 - DNA, 168 bp, Asteriusvirus sp.
  source 1..168: mol_type = genomic DNA
atgagttgccgcaaacaattcattcactctacctcctgtcgtgagacagtactgattagattgaatcctcctttgaggcagttcatctttgacaacctcttttttcgtaatatgaacagtactgttattaacagaatggtagcagtactgttattaacagaatggtag

SEQ ID NO: 423 - DNA, 126 bp, Asteriusvirus sp.
  source 1..126: mol_type = genomic DNA
ttggatcttcgaaagttgaaatttacgttgggacatataggatttgtgggatataatgagttttgtagcgatacagattatatgatttcagtactgaatgatgaaagaaagctattgactttatga

SEQ ID NO: 424 - DNA, 129 bp, Asteriusvirus sp.
  source 1..129: mol_type = genomic DNA
ttgcaaaatggaaaaggagcttggaaactacaaagtacggcagacttcctctgcctacttagtggcatatcagtactgaatcattcacacacatttacgtgcattcttgagcaatcttgtctatactaa

SEQ ID NO: 425 - DNA, 201 bp, Asteriusvirus sp.
  source 1..201: mol_type = genomic DNA
atgaataaagaacataaagaattctatataagtaaactaaaagaaaatgaacaagtatggattagatctataattccactggcatttaatagatatgcatttaacagatgtaccgagattgctatagacccttataatattaaagagaatgtacagtacaatcagtactactatatcttaatgattatatataggaagtaa

SEQ ID NO: 426 - DNA, 186 bp, Asteriusvirus sp.
  source 1..186: mol_type = genomic DNA
atgcatagagaatactacacacaatttgttaaagggaactacaaacatgccgtacccagaacccctttaaattctcatgacccaagtactatattcttgtttaatgacgcaatacgtacagtactcaatactaaagatgaagatgtgcagtacgtattcttactattacttatatacagacactaa

SEQ ID NO: 427 - DNA, 186 bp, Asteriusvirus sp.
  source 1..186: mol_type = genomic DNA
atgcataaagaattctacttaagccatctggatctaaactcccaaatgcttataccactaatcccaatagatatcaaggataagaaaaataccgaacaattcatttaccatacacagtgtgcgatcaccccaaattacattccatatgaattgtactacattctcgccctaatatataggtactaa

SEQ ID NO: 428 - DNA, 189 bp, Asteriusvirus sp.
  source 1..189: mol_type = genomic DNA
atgcataaagaatactacacaaaatatttcccaatgtacctcagaactaatctattagataaacctcgcggtatcaatgcacaaaatgataaagtgtattttactatgtgcactaaagcatgtatactagattttgacagctaccatcgagtactgtatcataccctgtacctagctttcgtattctaa

SEQ ID NO: 429 - DNA, 183 bp, Asteriusvirus sp.
  source 1..183: mol_type = genomic DNA
atgcacaaagaatactacacacaatttctccccagcatttttgtacactacgccagatataaagtccctctggataacgatttggcagtactgggattcaataactgcatagaacgaagtatagaaaatagtagtagttatgaccagctatataacactatcctacttatattcaggtactaa

SEQ ID NO: 430 - DNA, 192 bp, Asteriusvirus sp.
  source 1..192: mol_type = genomic DNA
atgaataaccacaaagaatactacatagagaaactcccaatgtatctccaacaccttgtaccaacagaaccattgcgtatagaaaaagactacgaaaaagactacttcattcagtgcactaaatcctcgatatatattgacgactataatcgagtactgtatcacatccttttactaatatataggtactaa

SEQ ID NO: 431 - DNA, 180 bp, Asteriusvirus sp.
  source 1..180: mol_type = genomic DNA
atgcacaaatataaagaattctacctctcgtaccttaattccgatatagtaacatccaatacattcagtactaaaattatctataatgaattaatgaaagaatgtattaaaggtgctattaaccctaaagatacgtatgacttgtactatgcagtactaacccttgttttcacgaaataa

SEQ ID NO: 432 - DNA, 183 bp, Asteriusvirus sp.
  source 1..183: mol_type = genomic DNA
atgcacaaagaatactacagggataaaatccctatgcatctccagcaccatataccaaaagaaccattgggtatcaaagaacacgcaaagataatgttccaacaatgtactaagtacacgctcatatacgatgataatccatatatgctgtactacgtagtaatgctaacattcaggtactaa

SEQ ID NO: 433 - DNA, 183 bp, Asteriusvirus sp.
  source 1..183: mol_type = genomic DNA
atgtataaagaatactatatctctaaactacccgtgcagcaaaaatactttgctgcatacaaagttcttctcataactcgtgccgctcgatctaactacatgaatagcgtaaaacgtgctatagaaaatgatgacgcaatgaaccagtactataacattttactcctaatatataagtactaa

SEQ ID NO: 434 - DNA, 660 bp, Asteriusvirus sp.
  source 1..660: mol_type = genomic DNA
atgaaacttaatgcacacagcaaacaataccttaagcactttaagtacctcaacagtattcaagcagaatcttttacatctgcatatacgtatcaccctaatgtactaaagaaacgaaataaaaagaaaaaatccagacctgttctcgtatctaagaacctcaaatcgtacttgaagaaaaataagatagctcttgcttttattaatatctataatactgatttaaaagtattgagtactaataccagcacaaaagcactaaagaatgcatctatctatatacacatggataatatcccgtgcactataattctatctttcgggaatgtatacttcttcgggaattgtaatagcacccatgatatcagtactgcacaattccaaatcggagatatgtactgcatgggttcagaaaaaatacacgataacatgcacttcttccaaaagcaacgtactaacgaaactgatacagtactgcaattcctcaaagaattacaaaacaaagaattatccgaggaagaagaattcatgtacagtactgtaatcgataatccaggactctataaaaacgcgtacaaactaacaaaacatgtacaggaacttatcagtactaataagaaaatgcatcacctcattacgtatattacaaactatgtataa

SEQ ID NO: 435 - DNA, 180 bp, Asteriusvirus sp.
  source 1..180: mol_type = genomic DNA
atgaaccaattctatatagaacatataaccataaaagaccgtttcatgtacgacaccttcgtgaagtactacaacctggcaactaacagtactaaaaatattaatctcaatagctgcattcatcacgcactaacaaaagataatcccttcagggaaatcctcgctctcgcatctgtataa

SEQ ID NO: 436 - DNA, 189 bp, Asteriusvirus sp.
  source 1..189: mol_type = genomic DNA
atgaacacttttgagtactacttcaataaactaaaccacatagaccaaagtatgcaccacacatttattcagaaccaccaatcatcttcacctctaattaaaaacatatcgattgagattataactacccgtgtactgtcatcggaacgttatatgtatattgatgttctgaaacttattgaaatataa

SEQ ID NO: 437 - DNA, 183 bp, Asteriusvirus sp.
  source 1..183: mol_type = genomic DNA
atgaacatagaattctatttaactaaactacaacacgccgaaagattcaacttcaataagttcaatattttctacaattgcgggaacaaaaaagataaacacacctttctatatgtcgtcacaagagatgcacaaaacgaaaagtacacatacagagaagtaatgaaactaatctctatctaa

SEQ ID NO: 438 - DNA, 186 bp, Asteriusvirus sp.
  source 1..186: mol_type = genomic DNA
atgaatcatataagctactactaccaacaactatccgacagagacaagtacatgtatagaacatttgtcaagtactacaagtatgggagcagaaagaatcaagtactgtacatgatcggagctataacacaagcacaaaacgaaaagtacacgtacagagaagtactgaaactaatctctatctaa

SEQ ID NO: 439 - DNA, 195 bp, Asteriusvirus sp.
  source 1..195: mol_type = genomic DNA
atgaataatcataaagatttctattgtagtaaactacacaagcaagaacagctaacattctctttagcaccacctatgagaaagaataatctatattacaattacgatttcaggatggagacacgtgatgcaatagaacatacgttccctgcaactaagtaccgctctatcctgaacctcatctttaagttctaa

SEQ ID NO: 440 - DNA, 210 bp, Asteriusvirus sp.
  source 1..210: mol_type = genomic DNA
atgaatactgaacataaagaattctacaccaaataccttagcaacgaagaacaattgtttctaaggagtgtatcacctttaagtatagatacaccacacgccagagattgctttaataattgtatacgtagtactctagaagcaatcgaatgcaataacaaaaatattatgtactcaggtttaataggactaatatatttctatgaataa

SEQ ID NO: 441 - DNA, 204 bp, Asteriusvirus sp.
  source 1..204: mol_type = genomic DNA
atgaacattgaacagtactacattgatgcactaccaacaaaaggtctacgagaaagcctactgtatacacaaaatacttttatacactacaaacgttgtcctaaactcctgaactcgtacaggagtaatatcataagaaatgctttacaaggggcagaaagtatgcaatactattatatccttgcccttttaatcgagtactaa

SEQ ID NO: 442 - DNA, 228 bp, Asteriusvirus sp.
  source 1..228: mol_type = genomic DNA
atgacaaatactcttaagtactacctcaatactctaaatgaactagagtacggggaatttctcgcggatagttcgtggctaattgagctaaaaaattataatagtccaggatgcacccttatgatgaacaatgcaattgataccctcattgtgagtattttacacagcaacatctgcggggatagcaataaacaattatcaaaaatcttagtactgctatctatatga

SEQ ID NO: 443 - DNA, 1149 bp, Asteriusvirus sp.
  source 1..1149: mol_type = genomic DNA
atgttaccttttgcaagaatggttaagtacgggaatattgcccctggtgatgatggacgttttaaaatatattccagtgattccatgtatcttcatgatacttatactgataagttgtatgcatcttctgcgacgaattggggtactggtacaggtgtagcatcgagtaaatttattctttgtgcggagaatgttaaacgagttctattggaagataacagtagtgattgtcaattgtacgaagagaaaggtacgggaaaagtttttatcactggcaacacgaaggcattcactggtgtaactgatagaaaaactttgtggacggactgtactacatggataacatcaggtggtattaatgtttctgatataaaatacatgagtagttttaatgatatgaaggtaaatttgataacaaacgatggtacattgtattgttgtggagctaacaataactctaacctatcatcatttggtgatggtacaaacattaattcttttaacacattcaaaagggtagatactataacttcggttaaaaaggcagttggtaacatatacctaaaagaagataatactttatggggttgtggttttaactattactatcagttaggtacaggcaatcaaacttctattactggggtgacgatgatttcttcggatgttatagattgtaatgtcagttatcagagtacattttttattaaatcggataataatttgtacgcttgtggtaaacagttcggtgcacaatacgggaacgaatttggcacaggtggtacttcttcatctaccgatatacaatacaaaactccaacattattgagttcaggagtttatagtttatatacttgtgttggtaacatggcgtcacatatagttaaaggtgatgaagtactttatgcatctggttcgaataggggtggtcaattaggtgttggtaataataataatcagtactcctatactccttcttatacttcttttaatagttcgtgtgatttggtacgcagtccatctggttcacttatacttacggatactggaaaattatattattgtggccttgcaatagtagtaatgggtggtatttctggacagaacgttcttaattatacagaagtagatatgtcatttatacaatga

SEQ ID NO: 444 - DNA, 1182 bp, Asteriusvirus sp.
  source 1..1182: mol_type = genomic DNA
atgttaccttttgttagaatgtttgattatgggaacgtcgttgagcgacctgtgggtacacgttatacctgtagtgactatagtgcgacttatagtttaataaaggatggtgtgttatatgtatctgggatgaataactattatcagttaggtaataacactaacgtaacacgttacaacgagtggttaaaagttccagagactgatagtgttaagttttgtagtactggttatagtcagacaatgtatcttactaacaatgggaggataatgatagctggcgaagatcctacttccagtgcgacggcggtaagtgttaaggtatggactgatataacttctagatttagtgcagttgatacaacgaagattgtttatatttcaatagaacgctttggtgtaatgatgatcatgcaagatggttcagtatgggcgtgtggagttgataatactggttggagtgggcagggaagtaaaactgttggtttctttactttcagacaaatatacaccggaagtgcaggaagtgcagttgcttgtactgctggtactggtactgcgagaattctgttagctaatggaacaatcttgtccgctggtactaatacatatcatcaatgtaatgctagtactgatccggctgttctaacattcactgaatcattccctggggttgatccttcattgatatatcaaatcaagatgtgtaataacaactgtattatatttttgagtgataagagatattacggtactggctggggaagttttggtgcattgggtgatggtgatattacgggttcgaataataaattctatgcaggtacattgtcagttgctcctaaaaacatgcgtgcttatatgtcgtatctatgtagttcttctggggattctagtatgtacataggcgatgataatttcatatacacctgcggttatcgtgggaggaacttaataaatgccactacagatattggtacgttcacgaaatgcattcaaagtgcacaaggatacaagaatggacttatatatagtgggaattattgtgctgtagtttttgatccagatttgggttcaggaatgtcatatgcggtttcatcaccaaaattgaattctccagcaccacaggctagtgttccagcattgggtatgagttcgttacaatctatcattttaccataa

SEQ ID NO: 445 - DNA, 1131 bp, Asteriusvirus sp.
  source 1..1131: mol_type = genomic DNA
atgttaccttttgttagaatgtttaattatgggaatacagtggttgctcccactggtataaaggatttccaagcaaatggaagccactgtatggcactaacatatagtggtgagatgtgggcttatggtacaagtacaagtggatcaatgggaaccggattcacggtgggtgctgctgataagggttggtacaagtctaacattagtaatgttaaatcattcagttctaatatgcagactagcacagtggctttgacaaatgatgatagagtgctagtttgtggctcaactagatttgacaaattcagtactccagatattgcatcatctaaccttgattggttggatgttactgatcatattccacaggaagttattgatgctgggatgaagcaagttattaaccacgcatattatgttgccatttttactgaaaacaatctattatatagtgtggcattatctttgggtaatactagtactataatagatagaacatggcgaagaaatacatttggtgatatacaagttgaacgtgttgtttcgttgacacaaaccccaagtggtcctttgtgtatagttcaagatgcagacggataccagtatggtattggatataatggtaataagattattgataatacttccactaattcatattctgtatataccaaaatgggtacacttccttacaatgaatttgccatatcgaatagcgggaaattcagttcagcggtattatcagatgggagaagtgtttatagtggtacatttccaaagtcattcaataatagttttggttcatttttgaaagttggtgcggtatcagatactgtgtttggtttagatgcaaaaaatatgcgtggtcaatatggtcaaaatcaattaccaattgcgtcggctgataacaatgcaagtaatggcgttgtgaaccttcgtaatgttccagcgggaacacaaacgaaagacattcgatttatatgcggaaatgatgtaaagaacgtttatatcatatacacaaatgaagacggcattagctcattttatggattgggaccaaactttgatcaaaattcctcagcatatgcacaattcgtcaaagtggatttgccaggggcattattaaattaa

SEQ ID NO: 446 - DNA, 1203 bp, Asteriusvirus sp.
  source 1..1203: mol_type = genomic DNA
atgttaccttttgcacgaatggttaagtacggtaatattgcaccaggaccagaaccaatagagttctcaaatgttttacaacaacattatacaaactgtatgtatctacatagcccaactaatactttatatggttatggtagtaataacttttatcaatttggtcttgggaattcagcagcagttgcgtcatttacagtacttgcaacgcgatgtgcagccttttggcttggtgttcaaggttcattgatgattgatttggataataaaatatactacactgggtcggttggtgcattttctgattatggagatgcaacacctgttaatggttatttgagaacatggactgatgttactgcttcatttaataaaataggtgttatggctaatatgatcaagagtgtatatataggtgaaagtactagaatattattaaccgatggtagagtaattgcgtgtggaagaaatactaatggtgaatgtggctctggtaataaaaattccatccctacactcacagttatgactaatatgggtgaagttacacatatggcatgttcattacaaggaacgcactatatcaaatcaaataaagatgcatggttttgtggtaaggataactttggtgaaagtggttgtggtggtagttctgttgtatatttgaacaaattcgtgattagtaatgtagaacatattagtactacatacgatgttacttggtggtttactactggtgggcctgtatattatagcggggctaacagtactggacaagctggtaatggtacgactacatcggtaaatcagctaacaccaattaggaacacatcggtcacggttgatgtaagtaagtacagtacttttatttgtccaagtaatatgggaaatgcatcaattggtgcacctatggcacaatacgcaccatatgttagaagtagtggtgctaactcatatggtcaagaaggtaatggaactaatacattagttagaacttggaatatttttaatcttagtgcaataagtggtggttatgacaatgttcttatggcatctaaagattggagcagaaccataataattactaaagattataaattatatgcatgtggtggctggaatggaaatggtggtagattgccagatggcacttatagtattactacactaacattaatgccaacgcagttatggcaacaatag

SEQ ID NO: 447 - DNA, 1110 bp, Asteriusvirus sp.
  source 1..1110: mol_type = genomic DNA
atgttaccttttggaagaatgattaggtatggaaatattgtccctggtcctaaaaaaataattaaagttggtgcttctacccaaggccaattcttattgactgattcacatgatttatattacataggtagaaatcaaggtggtgaatctggaaatggtaataccaacacggtgtcttcgtggacattagtaagtgcagatgtttctaattttttcactggaggacgaacacttgttattattaaaaatgacaatacaatatggacatcaggtgaaacatattggttcacatcatcaacaacaacttcttacagtactgtattagttgatagaaccagttggtttaccaatgccataccagtaagtgaaattgctaatattgtatgctcaaatggtgtaatatttgtacttagttctagttcagtactatatggtgcaggatataatggataccgtggtgcattgggtattggttcatcatcaatttatacattaactcaatgtgctacgaacgttcgtaaagtaatgaccaatgcgaatgatagtatgtatcttacattagataataagctatatagttctggatggaatagtagtgggcagcatggtacggggaaccaaacacaaattaacacttggggattgcgtagttctggtgtaatcgatgcagccattggtggtaatgcattaaattactataatggtacatcatatttcgtatgtggtcaaactccaaactttcttagttcaggtacgactacattccgtgcagttcctgtaagtactttgcctaatagttctccgttgtttatgacgaattcacctgcattaaacactgctacacaaatggtaatcactagtacatatcagaagggtgttggggcgaaccgtggtttgggattaaacaattctcaaactggtgcaatatatagtgctgctaatttacaattacctgtagaagttagtgagattagtgatgttgcttttagtgacggattaacatcattattaaccaaagacgggaatgtatatagtactggatcgtattacgccattccaggtgcaagtgcagatgttgcagtctttactaaaattgatttaccaaaataa

SEQ ID NO: 448 - DNA, 1188 bp, Asteriusvirus sp.
  source 1..1188: mol_type = genomic DNA
atgttaccttttgcaagaatgatgaattatgggaatattgtcccagtaccacttcaaattaagaaaataatcccaactgatttagatgttgtggttctgtatacggatggtcaactatatgcacgtgggaataatagttttgggaaattcggtagaggaaacaacactgcattaaaatcatggacattaattagagaaaacgttaacgattgctggcttacacaaggaactttattagtaaaagacaatgactcaaattattattactgtggatatggtagtcatattggtttatcaactagtactactacgtttttaagttataaccaatatattcaaaatttgtacacacaaagttcaagtacttcaattaaacagatgtatggaggtactacgtggtttactttcttaatggacaataatacaatatggagtacagggtggaacagtgctagacaattcgccgatggaacgggaactacttatgaaataaccgatggttcatttgtaaaagcggtcacacctaatgttgatattgcacaaatacagtcaacaaataactgtgtattgttgtttgataaacaaaataatttatatattggtggtgttacatccggtataagttccgcgactacatggacttcatataatcaatatactttatatcaaccaaatacaacatacacaaaaacgttacaatacacaggatgctcaactggtgcagtaagtgctttagttgaaaatccaaatacaggagcacgtcagttccttgtcggtgggttagctaataatggggcatggggaaataacactacatctagctctgttaatggagttttaggaaataacagtacgacgttaccacccggtactttgtattcaattcatactggatacccaccacaatctagtatactagttacgagtactggtgtatatgcaactggtttaaatgccagtagttatgctggttcattgggtattggtactagtgcaactgttggtaagtttactgcatgtccaatgcctacacaaataacatattctatgtatgataaaataaaaatatatagaggttcatatcgtacatttctaactgatatgaaaaatatatattcaaccggaacttatgatgatggtggtcctcgtacaactagatatgtactagatacaccccgacaattataa

SEQ ID NO: 449 - DNA, 90 bp, Asteriusvirus sp.
  source 1..90: mol_type = genomic DNA
atgttaccttttggaagaatgatgaattatgggaatattgccctggcaaagatactgttgttaaaattaatagtgatgaaaattcaataa

SEQ ID NO: 450 - DNA, 1074 bp, Asteriusvirus sp.
  source 1..1074: mol_type = genomic DNA
atgggtcattatatatgcgtggacggaaaccaatcagcaaaaatgggagttactggttcatcttttttgaatagatgggttttatgtccttatagtgttgatgatttctggagttctttatattgtactataattagaacaaaacaaggggaattgtactatagtggaactaactcagtttttggtatatcatcttctgtttcaacatggactcgttgtgaatcatattttggatctatttctccgagttcaataaaagatataaaaataacatcatcaaccagtactaacaattccatgttaatactaacaagtgacggtcagttatatggtataggcatgaatggtgcaagtgaattgggtacagcaactacaccaattacatctccactcttaatagacactagtgtatctgcaattgcatctagtgaaatgagcagaaactttcactatataaaagatggtatatattatcgttgtggtgagaatactttttatcaattaggaaccggtgataataatcctattactacttttactgcattgaatcttggtagttctcatgtaattgcagtacaagctacacgatgggtaacacgtttgattgttcaaagtagtacatctgctttgtctttaatggcggctggttggaacacacagttgactataggtggttctgaaaatactgctataataaggtcatcatttactacaaatccctataccgatataacagcaaattcattcgataaactttcaccagtatcctatgttaatgcaataaaatccagtactaacattattaatacgaatggtaagggatataattctaatggtgctggattaggccgcaacgcattctctgggaattatggttcaatattaccaatagaattctttgatgatagtgttgacttggcacaggttgagtggtttggttcaattggtaatggttcagtatcggtagttagtataggtgaggatttatactggactggaaaccctgggtattttactgaacaaggtgagactagatatatatataaattcaaaaagtgcgttccttttagataa

SEQ ID NO: 451 - DNA, 1152 bp, Asteriusvirus sp.
  source 1..1152: mol_type = genomic DNA
atgttaccttttgcaagaatgattcagtacgggaatattaaacctgttcctgtaacaccaacgataaaagattttaagattggtttttcccatgaagtgttattggacagtgcaggtgatgtgtggggtattggatataataccgctggtcagttgggatttctggatgctaacacaaattcaataggaatgtggtctaagatatatgagaatgttagattaattggcgttactgccaattatacagttgtagttacaaataataatagaatactttacgctggaaataacttaatttctaatactacaacgtttgggtggaacgatataacgtctagtatgggagcggttgtagtggatagcatcgatgcattatattgcacagatggcatgatgcatattaaaactgctgatggttctttatacgcatatggacgtaatatgaacgcaaacgctggagttactggcgtttctggagttattagtgttgcaactaaagttagtggtttaccatcggctgtgaaagatatacgatatacgtttagttatggtacagtactatgtcaattagataccacctcggtatatggatggggaagaaatgtcaatggtgaattaggtcaggggaacgcagccgcagttcctaccccatcccaaagggcgggtgcttctattgctataggtacttcgtataatgctactgcaattgtttccggtactgcatcgttggttacatgtggtggacaaaatgatggtcagttaggtaatggtattactactgctggtaatgtatacacatatggtgctagagcatacccaagcgatcttaataatataagaagtccagtggattgcagtacaacttatacatctgcatttatgagtccagatggcatatattacacgggttcgaaccgaagtgtgtttggtggtccgagcgggactgccacggttgcagtatataccaaatgtagtgatttaccaatattatattctaatataacacagtggtgtagtggtactattggtggtgcgatatgtagcagtactgaattatatcagtgtgggaccggtagatacattgccggagatgggcagaacgcaactaggtatgggtttagaaagacaccattaccttgggatgcttattga

SEQ ID NO: 452 - DNA, 1176 bp, Asteriusvirus sp.
  source 1..1176: mol_type = genomic DNA
atgttaccttttgtaagaatgttggattatggaaataaagttttaccatatattcccaattttgttaaattagttaccccgtcatgtggttattcatatacatgcacgatgatgcttgacaaaaatggttcaatatgggctattggtcttcagaatggtggaatttttggtttaggtcatactaatcaagtaactgaatggacacaaatatacagcaatgttaaagatttttggtgcagtacaatgaactctttttgtctaatacgcacaaatgatgatagattcttttatagtggtttagataaatggctaggtaataacacaacaaatacagtgacaacattcactgaatgtacaagctatttcgcacaatttggtatttcaaaaattaaagagatatacgtgggttatgattatgctttgattttagatacagataatagtttatatttgttaggtgataatactggtgctaagtttggaataaacactgcatcatattataataaatttacatttttagtggataatgttaaaaaattctgttcatcgataacgccagctaactggattattaaacttgatgatacaatgtggcgtacaggaacaacaacttccggtactttgggaaatagtaagcaacaaacgtatgtattcccttgggttcaatataagggtacacctattacagaagcaatagatattttttgtagttcgaattatattggtattataacaaaaggtacaccagaatcatgtccaatgtacactctaggctttcaaggttatggtcaattgggtaataataatgtaacatctgcttataagttaaacccagtactatcaactacagttccagatgatagtgaattcattcgaatagaaaacactagtactcgtggactcgtatattatagttcaggtaaaatttatagtactggttataataacaatggtcaattggcaaataatactacaagagaatcaggttcatttgttgaagcaattttacctagtggtgttcaatttaagaaaagtgaatcactagttgcaggaaatgatgcaacattgtatatgttcattaataataaattatactacgcagggaaatcaccagataatgtatctgcaagcagttcatctgttatgaaagaattcctacttcctacaatttga

SEQ ID NO: 453 - DNA, 1206 bp, Asteriusvirus sp.
  source 1..1206: mol_type = genomic DNA
atgttaccttttccaaggatgataaaatacgcaaataaaatgaaagttcctgaagtgaaagaaatctttatttacaatggttatagtgcgtcagttattccagcaacagcactcttactattatataaaaatggagacttaatgggtataggtggaactagttcacaaaactatggattcggaaatggtgtacctaatgcgaaagtaaaagagtgggctttaatataccaaaatgtaaaacgttttagaacagcccaaggttcttttaatttaatccaaaccgaagataataaattttattacagtggcgtaggtagagctattggtacaggattaagtactgtcagtacttatactgattgtacttcatattttacatcagtattcaatgcaacacaattgtcgcaaattaaggacattcaaattgtaggggagggtatttttgttttacttcaaaatggtacgctatatggaatgggggccaatacacagggatattttggtaataacacaaccacaagattatcaacatttacttcaattaatacgaatgtggatagtgtaaaaacaggttcaagtgcagtgattgtgcagaaaattgataaaacactttgggtcactggtcaaaacacatggggttcacttggtataagtaatggtgaaactaacgttaaagtatggacacaaatgggtgcattagccaacaatactgttatacattatgaacttggtgggagtgcatcatgggttgtatctaaacacaacacgaataatacatatacagttcgtgcaagtgggattcaatcggaaggtaacttgggtaatggttcagccgcttcatcagggacagtattatctacaatctccactctaccaatatcagataatatggaaatgaaatcaaattcattaacatatggtgggcttacggttaaaactaacaattcactttatatgtgtggtataaacacatatggtaggctcggtcgcggtaataccacatcaagtactacatttgtagttccagttgatgcacctaaagttggcagcatcgagttattctgtccaagtgaatgtacaaatgtgtatatggataatcaaggggatgtttatttgagtggctatatcccacaagcgacaggtacaacagtttctgattactacactaaattcaaattatatcaaatacccagtcgtggtatataa

SEQ ID NO: 454 - DNA, 225 bp, Asteriusvirus sp.
  source 1..225: mol_type = genomic DNA
atgctaccctttggaagaattatcacatcatcaaaaaagaacatacaaccttctgttacaaaaatagcttcatctgatacaacagtttttgcccttatgtcagatggtacgttgtacagtagaggctctcaagagtttgggcaaatgggtataggtaatattataacacaaaccaaatgggttttgtgcaatacaaacgtagaagatctatgggttcgggtatga

SEQ ID NO: 455 - DNA, 897 bp, Asteriusvirus sp.
  source 1..897: mol_type = genomic DNA
atgtggtatgctggaaatggtgcatcattcggtttatcaactgataagtcaacaacgtgggcttctgcaaagatagtgtttgatagaataacagcacttggaaaaacaataaaacaaattgcagttagtgcaggtgcattaagcatattatgtacagacaacacgatatggaatacgggttatggtagttatggacaactgggaaatggtagaagtaccgattcactttcatcatttgtacaaggaacagtacctactggagtaacaccatccaaaatactggcaaattttcttatgcaaggatttattggaaccgatgggagattgtattatactggtgcaatatcaggcgtaggtacaaccgacatgacgttatattcaaagtacacgttatgttctcaaataactaatacctatacggtgaaagattatacaacaaactcaagttacttcgcttttgctatagcaagtaataatagtagtaataaattatttgcatatcatggtggtggacaatactttggtcagttagcaaatggttctacatcacaaacatatatttcgttaagacaaacaacacaagcaccaggtgatataataagaagcagtgtgggttattcatatttttctaatcatattataacttcattaggtgtttacgcaactggttataacacaggcgataacgcaggtcaattaggtataggtacacaaacagatgtctcagcctataccaaatgtgtactaccaatagagatgaatatgaataacgtatatgttacagcaactttatacagaacttacttaaccgatggtatacaaatttacagtactggacaatatgttacagacggtggagttgccagtactgtatttgtcaaagattcaccattttag

SEQ ID NO: 456 - DNA, 660 bp, Asteriusvirus sp.
  source 1..660: mol_type = genomic DNA
atgaaatcaaaattaggtttgttttataaaaactattttgttaaacaacgtaaatttataaaaaaatatttctctggcgagaagtctagtcctataatctttaaaagaccaagttataatacttacttagctggtgctaaacagtctaagaaatttattactcttttacataaaaacaaaattaaagcttcttatgttgaaacgagaagaaactcatcaataactcctggtgattttattgagtacggatgtttcaatattaagtacaatgataatacatactttatggatattgattgtaatacatccaatctttttaacattgtagtaaatccattaaaacaatataatgtttatggtgattctattatcaaattaatcaaaaacaaagatagctttgattttgaaataaatgttttagatgataattttgacgaagtaccagtaaaccctgaaatctgtgatattttaaacagtttaaaaggtagtacctacaatatatcatctgatttaatgtttcagtactcattaatccataaagatattgaaaagtatattgaatgctccaaaattttgaattatctttacgatgaatttaaaaagagttctaaaataaccgcatacactttgtacaatattcctaaaatggtgaatctttga

SEQ ID NO: 457 - DNA, 372 bp, Asteriusvirus sp.
  source 1..372: mol_type = genomic DNA
atgagttaccgtgagatattttccattatttcaattattatgttcagtactggaacactggtatggttattatacttcttctgtattaatccagtgtataatatgttatgtaatattaaatcaagtgccggatatatcacttttatggtctttatgggatattattgtctaagcattttaggtgttgttttggttgttatatttgatgtgggaccaaatagtgatggtatggaaatacatgaattaataaccatgtttggatgtatgataccaacagcactactgtttgtagctactggtagtggattgataaaattatataattatttaaaatccattcataattccattcataataagcgtatgtcataa

SEQ ID NO: 458 - DNA, 363 bp, Asteriusvirus sp.
  source 1..363: mol_type = genomic DNA
atgaacgggatagaattatctttcgttggtcaattactagtaatggcgtatacatttatattctcactgaatgcattcgtgtgcattgggaagtacttccataagcgaccattatcaaatatatatgatgtaatccaaaagagatatagtccagcatatactgtgttgggtacagtattcaattttggttttattgtattaataattggactgttcacatcctctttgaatacaataaccttcggtcttatgatatgttcattggtattagcagtaattatatgttgtttagtactgcaccttgtggtactattgtatataaagatctctgaaatccaccaacgtttgggtatgaggaaataa

SEQ ID NO: 459 - DNA, 369 bp, Asteriusvirus sp.
  source 1..369: mol_type = genomic DNA
atggaaattgctcttattatcttaactgctatgttgtttattagtactgtggttataattggtaaattcttttgtgtatcatttttagaaacggtatacgatgaaattgctgatgattatgaactacaagccggatttttcattacgtattggcttagtttattttgtctagtcattgcttggattttacatatctttaaatggggtatggtagacggtgatcctattatggcaattattgttctagtgtttggtatccttggtggtgcagtgcataatctaatggttatctggcaaactgttcaatatgttttggttccctatttcgaaaagatgcacagtacaattaaaaaacgtaaacgaggttag

SEQ ID NO: 460 - DNA, 315 bp, Asteriusvirus sp.
  source 1..315: mol_type = genomic DNA
atggatatagtaacattgatttacacgttgtattcattctatttcattatgtgttgggttggatttttatttgtactcaagatgtttgattatgttgaaaaacagataaaagaattttgtattccttttatcggttcaaccattattagtgtttcttgtgtgtattttttggtttttgatccaccagataacactgcaatgattgacttgatgttactaccaacaactgttacttttttatgtagtctgctgccgccgattagccgtggactaacagaatttagacgcaatcaaaagcgtaaacgagggatgtaa

SEQ ID NO: 461 - DNA, 336 bp, Asteriusvirus sp.
  source 1..336: mol_type = genomic DNA
atggagtactttattgatttacttccgtggtatatgaaagttagtaccatgtactatattattagtgctggattctactttctgatgtggttctttaaacgaccaatttcagtattcatcgctgataacatgctgcaattaaaattacatgtatggttcttggcttctatgattatgccaactattcactactcgctaattagtagagggtttcgttctaatggtgaacctgtagtgcttgtattctattgggtttcaactatagtatatattggactttttttgttgccagtcgttcataagttacgtgctaaagttcctgatgcgaggtactaa

SEQ ID NO: 462 - DNA, 348 bp, Asteriusvirus sp.
  source 1..348: mol_type = genomic DNA
atgtttgaagcttatcttgagtttttaaggagtagtccagttgcacattcaattgcagggattattctaacaggttatgtaacattttgggtagttatgtttctaggatggtattttaaacgacaattctataagcgtaatggtgaagattttatgaattctttcattaatcaatcgttgtttgcatcaacattgattgcatgtattgtagcaacactcacaggaaaggtactaccagctttttccgcagtttacggcacacttgggatgatatgtttaacttttatattgaccattaaaatttgttgtgttatgattgaacttcgaaataagataccggaggaatga

SEQ ID NO: 463 - DNA, 339 bp, Asteriusvirus sp.
  source 1..339: mol_type = genomic DNA
atgttaacattctttaagtcagatacaatgcttagtattactttgatttatctttttggttttttcttttatcatgcactggttgtagtactatggtattttaaaaagaaaattgtttttaaactgtatccagtgaggaattcatcactagttctttacacacttgttcaaggtttgtttgcaattgttggtcttatggcacacttaatttattgtgctaatcctcacttgaactcaatctcacaatatattgtattctttgggttgttcatttggttagttgtatacttaatccatctcattattcatggtagagataaaattcgcggagacttctaa

SEQ ID NO: 464 - DNA, 342 bp, Asteriusvirus sp.
  source 1..342: mol_type = genomic DNA
atgcttgagttttttaattcagatacaatgcttggtatcacgctaatttacatgtttgtatttttgtgttatcattcaattgtaattagtctgtggtattttaaaaggaaaattgtttttaaattgtattcggatgataatgtagtcttagttttatatagtattatccaaggtgggtttattttatttggtgtgatgacatatgcgatttacatgttacaaattgataatacaccacacattacacaatatcttgtgttttcaggtctaatcgtgtggttgttggtgtgtagcatgtactttattattaaagctcgtgatagaattaaaggggatttctaa

SEQ ID NO: 465 - DNA, 771 bp, Asteriusvirus sp.
  source 1..771: mol_type = genomic DNA
atgaccagagaagcacgcagcattcaaatccagaaaaacttcaactccatgatggttgctcttgagtgtttgctcgacgatagcagtactgtaaaaagtatggttgtcagtggtgctcctggtgttggcaagacttacaccttgtcccaacgtctccagaaggctcatgacgcagcagaatggaacgtagctactatcagtggtaagatgactactcttgctctgtacgaagttctgtacaagaatcgtcacagcaccaacgtattagtacttgatgatatggatagcatctttgaatcagaagatggtatgaacctactcaaagctgttttggatagtggtaagcgtactgtatcttatatgactagctctaagtacttgagcactaacggcattcctaatagctttgattttaatggtcgcatcgtattcattactaacaaagatttagcgttagatgctaaagctaaaactaaaatgtctgctcattatgctgctcttatgtctcgttctgtgtacgtggatttacagattcagactaaaagtgatatcatgattcatattgaaaatgtaatgactaagactaatatccttgcatctaaaggtgttaacagtaacggtagtaaagcaattctgaactggatgttaaaacatgaagataatcttcgtgcaccatccctgcgtatgcctttgttgatttcagcagtatataacaacaatccgtatgattgggaagaacaatgtgaaaacttgttccttgagaaaatctaa

SEQ ID NO: 466 - DNA, 114 bp, Asteriusvirus sp.
  source 1..114: mol_type = genomic DNA
atgctgcgtgcttctctggtcatttcgttatcctcatcagttgatgtgtgtattttagcaaaggtaaataacggtgtcaacacttttaactatatggacgtagaaaatgcgtag

SEQ ID NO: 467 - DNA, 915 bp, Asteriusvirus sp.
  source 1..915: mol_type = genomic DNA
atgcgtagaaaaacaaacgatgaatttataaacgactgtaaaataaaaagaaaagatattgattttgattacagtaaagttaattataccagtaatagatgtaaaataatagtgatagatccactatatggtgaatttgaaataaaagcattgaactttctcattcaaaatcaaaatcacccattacgtgcacaacataatagaacaataagtaagactagaaccactgaatcattcattgaaaaagcaaaagaaaaaagaactgacattgactttgattatagtaaagtttgttatattcacaataggaaaaaagtatgtataatagatcctgattatggtgagttttatataaaaccaaacgactttttacaaggaaatggtcatccagaaaggggtggaactaggagatcaaataccgaggaattcgtgttgaaagcaaaggaaatacataagaatataaattatgattatagtaaagttaactatgttaataacaaaacaaaagtaactattattgatcctgattttggtgaattttatataataccaaatagttttttgaggggccgtggtcatccaagtcgcggaaatcattgtcaaatttatgcatatatacataccataaaagaagacaataatataattggattaaaatacggtatagaaaatattcaaggatcacgcttcaaagaacaaaacgcagcaagtatatataacattgaacatttatattcatataaatttgaaacgtccagtgattgtcgaaatgcagaaagtgaatgtaaaaagttatttggtaaaggtattattctaaaagaaaatatgaaagacggatatacaaaaactacatcagtggataatataaattctattattaagatatacgaaaaatggggtggaaaaaagggctga

SEQ ID NO: 468 - DNA, 990 bp, Asteriusvirus sp.
  source 1..990: mol_type = genomic DNA
atgttctttagaaaaagaagtgaacaatttaaaattgaaaaaaatgatttattaaaaaaattgaaaaatatttcaaataacaaatattcatatattttaactaaagaatcatattgcactgatgaaaatataacaattacctgtaatgagcatggtaattttgaacaaaaaataaaaaatcatttaaaaggtcatggatgtaaacgatgtggtattgaaagtaaaaatataaaaagatcatcttcacatgatgaatatattaaggaagtatctattattcataataatttttatgattatagtaaaaccaaatacactactagtagaaacaaaataacagtgacttgtcctgtacatggggactttactatattagcagcaggacataaaacaggaaaacaaggttgtcgtttatgttcaattgataaaagtaaatttactaatgatatgtttattgaaaaatctaatttaaagcatgataacaagtatagttataaacatacaaactatattcatagtcaaacacatgtgattgtaacttgtcatacacacggtgactttactataataccatcaaaccatttaagtggtgctggttgtccaagatgtaccgcgactggatacaatccaaagctgccgggatatttctatattcatgaaataacttcgagaatttcagataagaaattttataaatttggaattagtaaaaatattgataaacgtttccaagcatataaaaataatgtattacaaacaacaaaatataaatcgtttttctccaacgatggtaaattgatacaagaacttgagaggtatatcaaaaaagaatcatcaattgaggttggcgtactatctaaatcattatatgctaacggattttctgaaactataagaggtgaagatttatcaaaacttctacatattgtcaatgaatttatatctcagcatcgttgtggttcatatatagaagagattgatttattttaa

SEQ ID NO: 469 - DNA, 636 bp, Asteriusvirus sp.
  source 1..636: mol_type = genomic DNA
atgccagctaaattaactttaatggatataatccaacgtgccaaaaatattcatggtgatgaatatgattatagtttaattactgaatacgaaaatagtaaaattaaagttgatataatttgtaaaaagcatggcatcttttcccaaacaatatttagtcatttacaaggtgcagggtgtaatgaatgtggtaaagataaaaaatcattaacacatgatgaatatatcaaacatgtatctgagattcataataatttttatgattatagtaaaactttatacactaaacaggcagaaaaaatcattattacatgtccaatacatggggattttgaacaaaaagcattgtcacattaccaaaatcatggatgtaaacgatgtggtattgaaagtaaaaatataaaaagatcatcttcacatgatgaatatattaaggaagtatctattattcataataatttttatgattatagtaaaaccaaatacactactagtagaaacaaaataacagtgacttgtcctgtacatggagactttttaattttatcaaaatcacataaaagcggttatgggtgtaataaatgttctttagaaaaagaagtgaacaatttaaaattgaaaaaaatgatttattaa

SEQ ID NO: 470 - DNA, 240 bp, Asteriusvirus sp.
  source 1..240: mol_type = genomic DNA
atgaaactatcttttatacgtttagcagaattcttcggtactgatattattactttacaacaaattgcagacaatacttcattaagtacacaagaagtacttgacttagatgtaattaagtgtgataatacttccatcgatttcaaagaaggtcttgtcgaaaaagataagattcaggctaagattaatggtgctggacgggttcagtactggaaaggggttttaagtaatgccagctaa

SEQ ID NO: 471 - DNA, 360 bp, Asteriusvirus sp.
  source 1..360: mol_type = genomic DNA
atggcatctttaagtgaaatcgcagaatacaacccactaacaatctcaacaattcaacgtacaaaaactttttatttccgtcctgctgatggatggaaacgtggaatgaatggtgactatcgagtactggaagattcactaatcgagcgtatcaactctgaactacagaagtatgaaggtgttaaagttgtgcgttcaacttctcgttattttgagtactacattgagtcttcaactgtaaatgaaaactcatcattctcggtggacaacactgatattcttcgtaatgctgttggtcttttatgcaggattgcagaagaaattggattaactatcaccacaatgagtgagttagaataa

SEQ ID NO: 472 - DNA, 195 bp, Asteriusvirus sp.
  source 1..195: mol_type = genomic DNA
atgttattagtatattcaaagcgtttctggatttctttcattgtactttcgctaatcggcttcggtatgagtataatcttttcgtgggatgaattgggtacatggtattatgaagttccgtggtacatgaagatagctccttgttacgcggcattgttcgtgtccttccttattgttgtcttcagtgaggattag

SEQ ID NO: 473 - DNA, 516 bp, Asteriusvirus sp.
  source 1..516: mol_type = genomic DNA
atgacacgcattaacttagtacacgttaaagaacttgctgaccaacatctgatggctgaatatcgtgaacttccacgtgtgtttggtgctgtacaaaaacatgttcaagcacgtaagcgtgtacgtgatttcaaaattaacagtacttacctgttaggttcaggtcatgtaacattcttctataacaagttattgtacttgcagaagcgtcatattgatattgttaacgaatgtttgcgtcgtggtatgaagattcaaaacattgaagtaaatgacattagcagcttcccggtggagttttgtaatgactacgtaccatcggagtcagagattaaaatgtctcgtgagcgtttgattgagaagctacagatgaagcctacgtggtataaatttactgacgttgaacgcccacagtacgttaaagatatgcaggacgtaagtagtaatatagaatctagtactgatatgttcgacgaaattgaagaacaaatcaaagatgaaatgaataattattaa

SEQ ID NO: 474 - DNA, 372 bp, Asteriusvirus sp.
  source 1..372: mol_type = genomic DNA
atgaatatagattttaaaggtgcaacacgaactgttatcctcattggggaatatgctatcaagattccaacctttaaaagttggaagctattcttaacagggatgatagctaacctcaatgaacgttcgtggatgcagtactccaatcgtagtgatactggtatctgtcctactttgtggtcatcatgtactggactagtaactgtacagaaacgttgtaagccagttcaacataggggtttattttgggtggagttgtgtgctttagcattgaattcagagttaagtactgacttcttctattcagatgcgaagccagaaaactttggatatttgaatggtaagttagttaagcttgattatggagattaa

SEQ ID NO: 475 - DNA, 252 bp, Asteriusvirus sp.
  source 1..252: mol_type = genomic DNA
atgaaaattttattagttctaatactactaattgttttaccatttacgttagtatcccctgaacttgcatggaatgtgtttgtgtacttactatgtactatggtggtaaatggtatcttgttcttagttctattcataaatggaataggacacggtggaggatggaccagtactgctgatattgtacataaaaccactatgtctttatttgtagtgtggaatttattctggacttggtttgtgttcttctaa

SEQ ID NO: 476 - DNA, 177 bp, Asteriusvirus sp.
  source 1..177: mol_type = genomic DNA
atgaaactacgtactcgtaatcgactgatggatgcactgtaccatgaacagctttcactgaatgaagtgaagcgtcagttaatgtacacatatcagtttcccgctcgcattgcaaaacaacgtgctaaagaattgctgaaagaagcaatcgagtactgggaatctgattcgtactaa

SEQ ID NO: 477 - DNA, 555 bp, Asteriusvirus sp.
  source 1..555: mol_type = genomic DNA
atgattacttttaagaaaactgctaaccacatccatgaaatctacattaacggtcataaagctggccttcttcgtttactcgcccatcaccctgatgctaccgtatctgataatgaacctaaagattggcgtgtctttttctttggaaagtacagtgattttcaagtatcaaacctgaagaacattcgttcagtatgcacgttaactgaaattaaagaaaagttagcacaagcattgaaaactaatccagatggtgttcttccacctgataactttgtagagaaaggttatgccttagctcatttcaaagatggtactattcaatctatcagtactgaatatgaatatcattggactgagtacttcacttatggttcgagtaatacattgatggattcacgtagtaaattggaagaagtactgactcgtatgaatgaacgcgagcgtcagttatatgacaaaccagaaatgtggagttcaacttacattgaccgtattgactatgttattatgactccaatctttgacactgcttactatgattctttgaaataa

SEQ ID NO: 478 - DNA, 396 bp, Asteriusvirus sp.
  source 1..396: mol_type = genomic DNA
atgggtgttgaaataatgcgacaaatgtacaaagtaaccgagctaaacaagcgtctggttaaacaatctatgtttgaggataaagagtcttactataactttaaacgtgctgtagaggctgctatccacattcagaagcttaaagaacgtggttgtattattctggaaaatggttcggaagttgtaacggatgactttagtgtagcgtttgatgtttcacctgatgggacgctatcaatgccccgcttaggaactggaaacatgactgtttgggttggcttcactatggggaatgtacctggtactgtgtacgtagatgatgcggaattgaaagacagtttcaaaaacttatcttatcttgaaccacaatacgcacatgaaatgaatttattttga

SEQ ID NO: 479 - DNA, 255 bp, Asteriusvirus sp.
  source 1..255: mol_type = genomic DNA
atgtttgcgttgcgtaataaaaacactaaagaattattatgtattgataccgtatgggattgtgcggggtcaactacagttcttgaagaaggaactggatattgcgtgtttgttgtacatgataggaatgaactcgaattattacttgctgagttcaatgctggtggtaatcctaacagtactgaataccctgagattatcaatccagcacctccaggttcatatgaaatcctaccactatgggtgttgaaataa

SEQ ID NO: 480 - DNA, 345 bp, Asteriusvirus sp.
  source 1..345: mol_type = genomic DNA
atgtataatttgaacctaatctcatatattataacaacactgtttacattctatgcctttgttggtataatcctactgtactttaaattttataaagtgtttaaccgtttctatccttcaatggagaatgagtttttctttgtgttgtacgtaggttacacattaatggctacatgtttcactgtagccgatggagtcatcggcattaaaactgattccccaaatggtagtacgctggttgcatttattcttactggattccttgcaacttatattgccttcattacaacatggtcagtggttgaatttctcttgcgactacgaaagaatatgccgaatagatag

SEQ ID NO: 481 - DNA, 342 bp, Asteriusvirus sp.
  source 1..342: mol_type = genomic DNA
atgatttattacactaacatgtttgcctatgctgttgcttgcatttacattgtttacttcttattcggtggagtactgtgcttctttaagtacaaaacgttgttcaaccgaatgtacccaaatcatccaattgtagttgtacttttgattctttcagtttctcaaataatcgttgaaactacaatgggtatcagtagtgtacattatagttttggtactatagtaattattactatgcttattgcatacattttagtacttggatatggtatctttggtaatattggtatgaaaatgtatcatcgaattaaaacattacgtgataatctaccggagcgttga

SEQ ID NO: 482 - DNA, 339 bp, Asteriusvirus sp.
  source 1..339: mol_type = genomic DNA
atggaacaatattttgaattaataaacaaagtatcattttatgtagtatctttggtttgggtgtattatatgttttgctacattattgcattcttccgatacactactttatatgaacgtatctactatgatgccccaatttcattcttgatgttttgtgcatgtacgtggggaatattagaagtactgatatgtgggtatagtactgatgaattaaatctggtatcggtcttgactgggttttcatttgttgttatgatagctgccgttccagtatggttgttctttggactagttcatcgcattgatatatggcgttctaatatccctgaaaagtaa

SEQ ID NO: 483 - DNA, 282 bp, Asteriusvirus sp.
  source 1..282: mol_type = genomic DNA
atgcgttcatttgaaaacttaataggtaagcatcttttatctgaaattgatgcagacgttaaagaattatccaaatcaaaaagttacattcatttggatgaactgtttattaagtacggtgagattggttttaagtcattatttgtttttactatgaaagtacatagtttaaagtacttcgatttgagtgctaaagatggtgaaccgaatctatattacatgtattaccttaagaacaaagatgaagctaatacattactctctgaatatatattggggtaa

SEQ ID NO: 484 - DNA, 642 bp, Asteriusvirus sp.
  source 1..642: mol_type = genomic DNA
atgactaagcaagaaatattcaaaactttaattgacattttgcgtccatcaaaaactcgttgtgcgatggagtttgatattccttatgctgaacgcgtaatctttccacaagttaaagctgctggacttactttgcttggaatggggatgtactctgtagtagttgaacataaaaactatcctggacgagcatttaaagtaaccacttcacgctgggatggttttcgtgcttatgcaaagtactgcattgaaaacgcaggaaccaagtttcttccagtgatctacagtgccaacgaacaaggaaactttggatggtatgagatggacaagtactatcctataattaaacaaaaaaataattatgatgactttgttagtactaaaattggagatttgtattcgtatgcacatgctggtcagtacgcaacttcagtgaatgatatgcgtggaaattctgaagagattgctattgcaacggtcgctgctaacatcatgaaagagtttcacgggcgttttgtaccagacattcattcaagtaatgtgatgatggataaagatgggaatgtattcattactgatcctctttcgtgtgatgtgcgtagagaaataccaattactgaagaagatccagttttttattga

SEQ ID NO: 485 - DNA, 1539 bp, Asteriusvirus sp.
  source 1..1539: mol_type = genomic DNA
atgccacaagataatggggatatgaaacatcgtaatggtggactagtacaacactcggataaatgggccgaccgaaatcgtcgcaaaaatagttatcaagcaggacaaggttcacgtggttccagaaaccaaggaacgggacttgctggtaaggcaaacgcagaagcaggtgaagttaagagtactgagaacatgactgagctagaaaagctacgttatgttaactcattaggtcttcttaacgcaacacagaaacaacgccttgctgatatggaacgtgctgagaaagaacaagcagttcctaaagaagaaccaaaaccagaagctcctaaagctgctaaccctgttaaagagttatctgataacttaggtaagatctttgctaacaaaccacagttgattcagggtattgtcaaagcactacaggcagttcctaaagaagaactcaaaggtaaagcacaagctgtacttgatgcaatgaaaggtaataagagcactgaacctactgaagtattcagtactatcatgcgtgcacttgaaggtacacacaaagaagattccaaagaacctgaacagggtgaagcaagtcttgatggtattcttaaaacttttgatagtattggtaaagcagaccgtgctaatgcccagcaagtcaagaatgtactggctaaacttgaaaaccgtttagaaggtaaagacgataaggttaagctcgtatcagatgcagttaacagtgcacttaaatcttatgtacaaggtgagaaaagtcgcttcgtaacagctatggatgctgcattcaacactatgaaaaagtatgaagccgaacatggtgagaaagtgacacctgatggatatctactacgtaaagatgaagaaggtgcagttgaacagaaagatgttgagcctgagcaagaagatctacctgataccgttgatatggatggttacattcatcgtccagaaatgggagagtttggttctgacaaagaaggatttgaacatgcaatggcagtgtacaaagctctcgtggacaatccagattatgccaaccgatttgtagatgagtttgatagtgcatggaacaactacaaagacaaaggttatgacttccctgctgaggcagcattctttgaacttggtaaactattagctaaacatggaattgatgtaggttctaaagatggtactgatactgatggcatggaagcagaattggctaaagatcgtgaaatgaacgacaactccattcatgaactccaaaagctaatgatgtggatatccgatattggtaaaaaagctggtgctgataataagagtatcaacaaaaacattagttggattaaaagtaatgttggtaaaaatgctcgtaaactacaaaaagcatggactgatttagtaaatggtgctgatgatgttgacattgaatcacctgaagcatacgaatatgcattaactactcttgataattcctttaaagattacgataacggtaacgtaactcattgggaaaaggacatcatgagcaaatacggtaaatga

SEQ ID NO: 486 - DNA, 555 bp, Asteriusvirus sp.
  source 1..555: mol_type = genomic DNA
atggaagaaataaacatggaacgttggaaattaattcctgattatgactattcaatttctgatcatggaagagtaagaaacgaacaaactggatatataagttgtggatttaaaaataaagatgggtatgtgaaggtcgatttgtatcgcaattctgtgaaaaatagaaaggcgattcatcgactagtagctgaagcatttttaccaccacccacacagaaacagttacagtgggcgagtagaacaaagaaaaaagttgttcacataaaccataaagattgtaatagaagtaacaatcactatttgaatttggaatggaacacagcatctgaaaacgtactatattcttattcacatggtaacgcaacaactaatcgtggtgctgctgtgttgacatgggaaattgtaagagaaataagaaaagattataatgataattataatgataattataatgatgtgatagaatatgcacgagaaaattgtaataaataccgtgtatgtaaaaaaacaatacgtcgtattttatacaatcaaacatggatagaggattaa

SEQ ID NO: 487 - DNA, 297 bp, Asteriusvirus sp.
  source 1..297: mol_type = genomic DNA
atgaaattaattatagcaatgataatgtgtttggctttccctgtactggctactcctaatctggactgcacactgttgcgttcagatggtgacacacttgaaatcaacacatatgaactctttggtccaagtgtagtggagaatgaaaccacctacaatttcaaagctattgactttgaaggtaatgttccagtactaactacaatgactattgacaaaactactttactcggacgaatcaccacacaacgcggagaaagtaaaacattcacagcgaaagctgactgtaactactaa

SEQ ID NO: 488 - DNA, 264 bp, Asteriusvirus sp.
  source 1..264: mol_type = genomic DNA
atggctgaaacattatcactatatgcgttagtactgttatttgtcggatttcttcccgcactcattacagccattcgtgttgttaaacatgaagctgcattgattgtatgtagtattgggtcgaacattctattgtatttctttttgacaaatactattgtactgtttgctttctttatcatgattctgtgggtacttgtaattctcggattcttcatttggtcattggttgatcctaagaaaaaatcaggagaagtgaaatga

SEQ ID NO: 489 - DNA, 114 bp, Asteriusvirus sp.
  source 1..114: mol_type = genomic DNA
atgcaaggtactaaattcatcatcgctgccctaatcgctgctgttgtagtgggtacagtatgttattcaattgacacctatatcaatacacctagtgttgaacaaaccaaataa

SEQ ID NO: 490 - DNA, 207 bp, Asteriusvirus sp.
  source 1..207: mol_type = genomic DNA
ttgaatcgtgtctttgaagatcatccaatttatgtacgtgatatcattgagaaacttaaagtgactcctaaagagcacttcaaggcaacagtacacgcagcattccgtgcactacatgaagcactaaagaaaactcataaccttcgcaagattcatgatgacatcgtgaactctattgaaggcgaaaaacataagtttaaaaaataa

SEQ ID NO: 491 - DNA, 312 bp, Asteriusvirus sp.
  source 1..312: mol_type = genomic DNA
atgaacgacaatggcgagatttatgacgttatgcaactacctcattgggcttataagaatacatctgatgatgtgatggctgctgttatgcgtgagtttgaaaagctacctggtggtgatattaagaacatcgtattcaatgcagaacgcatgaactacacaccagagcagcttcaacagttggcaattgctgcctatcaagctgccattaagaaacctgaatgtgtgatattaaagtacacaccggacttgaagttaacactagaagatatggattcctttatcttcagttcagaacttaaacagtactga

SEQ ID NO: 492 - DNA, 156 bp, Asteriusvirus sp.
  source 1..156: mol_type = genomic DNA
atgggttggattaacgttaatagcattgaactaaatgagcaagacatatttgcctttgttaatttggtagagaacattgctattaaaggtcgtctgtttagttcatcggacggtaaaaaatggatctcttatgaacgacaatggcgagatttatga

SEQ ID NO: 493 - DNA, 573 bp, Asteriusvirus sp.
  source 1..573: mol_type = genomic DNA
atgaatcgtaaaggtcgttttaaagtatcaaagaagaacaaaagttctagatttagacctataactttaacttttaaggctaaagaagaattaactgcacttagtaaaaagataatttcatctaagattaaagtatcatacgtaaattcggtaaaatttcaaaaggttaaaccacaagacaaactcatttcacttatatttaaacgtaatgattttgagatattagtagatgattatagagcctataatgctggattcattcatgtcacttgtaataccgaactaactgagttggaacatttgacatgtatcataagtgtagataacggtgtggtgaagtacaattttttacattttaccaatatcaataatggaatgggtgtacaatccagacctatagtacctacatgtgatgtgactaatttagcaaagctcaatgaagaagaatattttcaagaaagcattgtaactgagcatttagatgctataatagcaacttacaaagaatgcatatgggttttgaatgcgataaagcccaaattgtgtttaatgaatgtcgttcgtgatttataa

SEQ ID NO: 494 - DNA, 222 bp, Asteriusvirus sp.
  source 1..222: mol_type = genomic DNA
atgaaatatatagtacttgtactgatattattcagtactgttgtaagtgctaaacaaaaagaatatgttaaatgtataaattatgaagagaaatatgttgaaacatataaaaaaagtataattaaaaacgtttcgattactaacagagcaacaatcattgtacttaaaaatgggttaattatgctatataaaccacacgttaaatgtgaaattattaattga

SEQ ID NO: 495 - DNA, 294 bp, Asteriusvirus sp.
  source 1..294: mol_type = genomic DNA
atgatcagtacttcagttaatgaaagcatcgtcgctgacgtagaaatggttaaagaatgtgcagatgaaactcttcgtgatatgtacattaatgatttaattactgaatacggtagtcgtggtgtacacgaatttattcgtttaagtggagagttgatgaaaaatcgaattcgtatgaagcttaacgtacatccaaaagcatgggcatttacattaaaatacgcagaagatattgtgaatttgcgtcgaactgaagtatatgaacgtttgcacaatggtatgttagataaatga

SEQ ID NO: 496 - DNA, 267 bp, Asteriusvirus sp.
  source 1..267: mol_type = genomic DNA
atgaagcttaaattacaatataatggatttactttacgtaatgatactgaatttattaatcgttctcctggtgctgaactgtttttacgagagatgaacattcctttcgtcatcactacagttggcgaccgtgaagttctacaatacgcagagcatccgattattgatgttccctggtactctgagcatatgtacatggatatggcacgtcgttacaactgtaagttcgtagttgaaggtgataaaattacagtcgaatttaaataa

SEQ ID NO: 497 - DNA, 345 bp, Asteriusvirus sp.
  source 1..345: mol_type = genomic DNA
atggataaaactcaaatagaattaaagaaatttgtttcattctatcttcctgatgacccacgtaattcacaaaaagatattgaatattataatatcctatctaaacagttaatgagaaagtttcaacagtgtttaactatattcaatacagatggaagacgtagataccgaatcgtttcaatgaatgatgaaaacgcaaatttctttgattacgatgtagtctttagggcatataatgatgatcgtataaaattaaattatgatcaaattatacttgacctgaatgttatatgtgttataattactcacatagccgaacttaatggttttaaagaatggtattga

SEQ ID NO: 498 - DNA, 441 bp, Asteriusvirus sp.
  source 1..441: mol_type = genomic DNA
atgtatgtatatcgttttgaacttaaatttagttacattgaacctaacttagatcctgcacgaactgtaggtccgtttgcacggtattcaaccagatacagtactaaaaatggatttgaccgtttgctcatgactacaccttctcaattccaacctgaaccaactgaggatgggatctattcaatcaaaagtggatgggtatttggctgtcaaagtttgaaagatttgttcagattcttcactatggacttaggtaaattgcatcgtgctgggtttgctatatctgtatatgaagttccagaccaccatgtagacattggtcgtaatcaggttcagtactattgcggtagtgctaaattagttcgtatcatgtcagttaaggaagcaaaggatgagttccgacaaagtaaaagagaaacaaatgaggtaatatatggataa

SEQ ID NO: 499 - DNA, 192 bp, Asteriusvirus sp.
  source 1..192: mol_type = genomic DNA
atgttgatttatcaaggtgataatattcgtgttatgcagcatccctacttacaaatctttgatgtgcagcagtatatggaaggtgatgacccaagaacctatggtcgtaagtatgattacttcactgtaaagcagtgtaaaaatattaacgaagtacgacaattagttcaagaacttcaaaacaaaggttga

SEQ ID NO: 500 - DNA, 351 bp, Asteriusvirus sp.
  source 1..351: mol_type = genomic DNA
atgaaaactattttattttttgtatgtatgttaatgtgtgggttgtcatatgctgaaccattagaaggtttagtttgtacagatggtaatattaaacatatctatcaaggtgatagtgacgatagagatattgtatatattgatggacaatcatatacgtttgttaaagagcatacagtaggcgacattagcttcactgagttttccaacgatacagatcctaacttcttagcgtttattgaagtagatgtgtatgaagatagtaatggtacacaatatgctaaattagttatgatgcgtcgtggtgctaaagaaactagttttggtggcttgtgtaaatataaggattga

SEQ ID NO: 501 - DNA, 378 bp, Asteriusvirus sp.
  source 1..378: mol_type = genomic DNA
atggtaaacactattttacttttgttgttgaatattccaattattctgtcttttttaatttctatttttatggcaggatattgtttagttgcagtaattcattttattttaacaaacaaatatgtcctaatttctaagcttgattctatttttgcttgcgattcaatggcttataacttatggttaatttgttcttgcattatgggagtaactttccttctgcatgtatttgatgtccttgaccaaaagttcgtatacatcagtactggattggcactttatcctgctacgtggtacttgatttacgttagtgatatatggtatagtacttataaagaatatcagcacaagaaatcacttaacgttggaggaaaataa

SEQ ID NO: 502 - DNA, 360 bp, Asteriusvirus sp.
  source 1..360: mol_type = genomic DNA
atgaaaagttatataaaattaatagcacttgtgtgtgcattattttcatgttttagttatggtgcagcagcagaaacatattgtcgtagtactaagggaacgtggcatgtattgactaacgaccctagaaatggtaaaaatatagttgttgatggcgtgatttatcgttttaaagtagaaagtattattggtaataaaaaaatctcgacttatagagatgattctggtacattagcaaacgtaatattaattgtagacccaagaactggtaatggtgatatctatatagtaatttacttggactcatcggtacgccgtgacctagatatagataaattgaacttacactgtgaaatatag

SEQ ID NO: 503 - DNA, 327 bp, Asteriusvirus sp.
  source 1..327: mol_type = genomic DNA
atgctatcagtactaatttcaattccgtctttaattctgatttggcttctggtttacgaatgctttattactgatgataatgataaaaaagagttctctgagttgtttatgcttgattcgcctgttgtccgtattttctatacagtcgttgtggtttcagtaattgtatgggttttgagttttatctttccactcggtgcagtagttaaaactttggatttagttgagaactttgttgcaattatgtggctaatcaaagcactatttgccggaaatgttaaaatttggattgatattatcaaattcaagttcacgaataagatgtaa

SEQ ID NO: 504 - DNA, 240 bp, Asteriusvirus sp.
  source 1..240: mol_type = genomic DNA
atgtatctagtactaagttttgttgttgcactattgtttatgttttatcctacactagtagcattagccactaaacgaccgattgtagatatcactactgtattcttgctaaacgtggcattagtactggtttctattatcattcccgtgagctttactgttattgatattgtgtcggtattactcttcgtaatcagttatcttatgcttattgaagaaaaaccagttgacaaccattag

SEQ ID NO: 505 - DNA, 663 bp, Asteriusvirus sp.
  source 1..663: mol_type = genomic DNA
atgttagttaatcttaatttcatcacttcacctgactgggcattacgtggggtttctttaaacttcaaggaaactatgtttgattacattggtgagtgtacattggtaaatgcaacttttgacccaaatcatccgttctgggctgaaattcatgatccaactgtaaacaacaatacatctgttatgactattgtccagactaaacatgcaggtatccttgcaggttatcgacctggacatgcaattgaacacttcactgattacgatgtagtggatgaatacccaatgatccatgaagatggaagtctatacacatctgaagacttccgtgctatctttaatagtactgatgatattctaccaagtggacgtccacgtcctgagtcttatcttatgcattcatcttatggtgtagcagatacgcttgaacagattatgaagaagtacaagaacctaattgaaggtccagaagaaattgtcctgtgctatcacccagtactgaagtctgaacaaccaaaggatggtggatggcgttggcataagaatggtgattatattggtactaaacgaagtaaagaacgttttgagtacttgtatgatgaaccagatgttgatgtggttttgtgttataattttattaaggtgaaaaagaaatgtatctag

SEQ ID NO: 506 - DNA, 207 bp, Asteriusvirus sp.
  source 1..207: mol_type = genomic DNA
atgtggtggtgtcatggtgtatataacgtgtatgtaaatggtagatataaaatgtctagtacctatgcaagacgtgttaatgcgaacaaccaagttgatgctgcctgtgagatcattgagtggtatgctgagttcaatgcacctgactatatgtacgaaatagttacaataaatgttgtacaaatcgatacatctttgatacaataa

SEQ ID NO: 507 - DNA, 219 bp, Asteriusvirus sp.
  source 1..219: mol_type = genomic DNA
atgaatttatatctagttgaaggtttagtacaagtctataaaccagaaggtgaaggtcaacgtttttcacacgtagaagaatttaagtacgttgtacaggctgatggtcagtacgatgcggaaattcaagtagatgaatcattccgtaagaaaaatgaaattggtaaatttcaataccagaacttacaatacaaagtatggcctagcataaatgactaa

SEQ ID NO: 508 - DNA, 222 bp, Asteriusvirus sp.
  source 1..222: mol_type = genomic DNA
atgaatagatactatgttgtgtatgaacacgtctctgaatttaataacatacgcgggttttccagagtagtcaccaagatggatgtattcattcgtgctcttagtgaagtagatgcactgtttaaattgtttgatgaaattacaaagtataacacacctaaaacacaccgctatgtggaaactgtacattgcattatgctaactgaaagtgatgaggaatga

SEQ ID NO: 509 - DNA, 519 bp, Asteriusvirus sp.
  source 1..519: mol_type = genomic DNA
atggatattaatgagttgttgaaattagtgtttaatcgtgaacgccgcgatacaagaccaattgaatatcaagatgtgatacgcattgaaactgatttctgttatggtaaaacaactcatgatcttttgaatctctctggaaaacgatatgctgatatttgtttttcagagagaagtgatggttcagaaataacaagtactgatattgtttgttacgcacgcagtgctgataaatcttatgaaatagaacttatatattcccctagttctaaaacaaatcatcaccgccatattttatatgatgtttacacaccacctggtattgctgaatattttgttattgattatagtactgaagaaaatgtgtttcaacaaagtttgattcataactttgaggtgaatgatccattagtaccaaagttgttcaaactacttgacaccatcgatgttgactttgaatttgttatgtgcattagaacttctttattcaatgaattcatggaactttttaatatatga

SEQ ID NO: 510 - DNA, 201 bp, Asteriusvirus sp.
  source 1..201: mol_type = genomic DNA
atgtttactttatatcttgcagtagtactaactaatggtgaaatcactcgcaccgttggtgaaggtgtatataaaacacctgatcagtgttactctgcaactcattggcctcgtgatgctggtgatgaatctcgcactgaatacaaatgtatgaagattaaaggtgactttgtaaatctaaaggttattgagactaagtaa

SEQ ID NO: 511 - DNA, 147 bp, Asteriusvirus sp.
  source 1..147: mol_type = genomic DNA
gtgaataacaaagagtgggaagattaccgcaagaagtgccgagagtttgataaagaactcacaggtacagtgaacgcggtaatgtgggtatctgcaattattgcagtacttggtttgggtgctattattattaataaattattctaa

SEQ ID NO: 512 - DNA, 216 bp, Asteriusvirus sp.
  source 1..216: mol_type = genomic DNA
atgactaccaatgaaatgatgcaggttatttgggataaaggttgtgatattaaaatcactagtactgatgttcgtgtattcaaaactgaatatatggagtacttggatcttgatacttataataatattgtatcaatcgaacacaaaggtgcagtactggaaacgattgatgtagtactcaagaaagctaccgacctattaggagtggcagtgtga

SEQ ID NO: 513 - DNA, 276 bp, Asteriusvirus sp.
  source 1..276: mol_type = genomic DNA
atgattaaaaaactattgacagttgtctttgtattctgtacaatgtttcttacagcatgtaatgatgacggcaggtttagtgcaaaagacttagttcgtcaggattgtaaattcacaggcaagtcttttattaacgagtatgaaatatgtacacaatcaggtcgtatctgtggtggttgggaaaaacgtcaggagcgattgtatgtatatgaatgccctggacatcacaacaaagtactaagcacacacaaacttgtttatgataaggttgaataa

SEQ ID NO: 514 - DNA, 369 bp, Asteriusvirus sp.
  source 1..369: mol_type = genomic DNA
atgagccttgatacaacccgtgcaacagatttattcactcgtctgaatgatgaagaatatcttgctgaaataaagtacaatcttgaaaaacttgctcgaagtgctgaagtaattgaagttaaaggtcatttaccaatggatcaattccatacgttcaaagaagatatggtttattatccaaatgaaatttggattgagtgggaaaattggactaacaaaactctacgcattgaaggttattgtgtgaattatgaatctgaacctggtgatgttacaaaaactctctccatttggtgtacaaaaacacatgaactagttgaggtgaatttgaattatatgaaaggtttccgttggggtgatattcaatga

SEQ ID NO: 515 - DNA, 252 bp, Asteriusvirus sp.
  source 1..252: mol_type = genomic DNA
atgaaatacattgtagcagtactcgtcgcatttctactcactgcatgtgatgcttctaccaaagaacgtacaagtgattttgttctacctgctgaattaaaagaagcagggtgtaagatttatcgtatgcaacaagatggtgctggtgcgactttatacactgtgtactgtcctaatgcaaacacttcttcgtcgcatacgagtgggaaaattcgtatgcatacatcagtgattaatggagtacaacaatga

SEQ ID NO: 516 - DNA, 309 bp, Asteriusvirus sp.
  source 1..309: mol_type = genomic DNA
atgtttcaaactaacactcaaggttttgtaatcatcgatttgaatcaaaacagcggttattggatgaaacctactgacgcatgtatgcagtttgatttcttaggttacagaattagtgtaagtactggtgcttctgtactgaggggtggttgtatcgttgaacatctggtaactgatccagaaggtcgtgagtatgaaatcgcaggttcagtacaagatgccattatgtttgtatgtcagcgtgaaatgaatggttcgaactcaaatgcactgactcatgctctttctcaagaagtggaggttcgttaa

SEQ ID NO: 517 - DNA, 279 bp, Asteriusvirus sp.
  source 1..279: mol_type = genomic DNA
atgtctttttctaaagaagaacgtgaccttattaaaaaagcaatctggttttatgctaatgaagggaagtgcgatgaagaaaaagcacgtgaactgtgtaatatctttgagaagaaacaagatctaaaagtgtatcgtatccgtgatttggatgaaggggatcgtattgtcctagctgaaacaaaagaagaagcagaacaaatcttcactgataaaaacgaaaatccacattggatggaagaagtctgtgatgttaaaaaaggtacttatatcgattga

SEQ ID NO: 518 - DNA, 201 bp, Asteriusvirus sp.
  source 1..201: mol_type = genomic DNA
atgtttaaaccgaattccaatgttggaaagaaagttcaattacttgaggatgtatccactctgagtggcattttcccaagaggtcacatcatgactattattgccgaaacatcccgtgggtgggatttggaagatgctgatggtaatcgcatccttgaggctggattctatggtcatcgtgaatataaaatcattgattaa

SEQ ID NO: 519 - DNA, 183 bp, Asteriusvirus sp.
  source 1..183: mol_type = genomic DNA
atgcaaattatcattcttattgttggtattatgctgggtgtgtatggtcatagttggatgcaggagaagtttcctaatacacgtcctgactattgcagtactaatgtattccagaatggtgagaaaccaaaggaaagcattggtaaaaagctggataaagtacttgatgtgatcaatgaataa

SEQ ID NO: 520 - DNA, 252 bp, Asteriusvirus sp.
  source 1..252: mol_type = genomic DNA
atgttttatttaagaactcaatatagaaagtatactctagtacttcttatatgtcaactattattctttctcaccaacaaacagtttaacttttgtattactgttataacaccacatctgttctttgttaatagacatccagatatttttattgacctgttcgtaggtactatcacgaacagaaatacattgattcatggaattcattggagtgatttgtacaccgctttgcatggaaagagctactactaa

SEQ ID NO: 521 - DNA, 117 bp, Asteriusvirus sp.
  source 1..117: mol_type = genomic DNA
atggaaagagctactactaaaaagattactgaattcattggatattccttaatggttaatcatccatctcttcgagatgtctgttcgcttctaatactacgtattctacgcgaatga

SEQ ID NO: 522 - DNA, 240 bp, Asteriusvirus sp.
  source 1..240: mol_type = genomic DNA
atgattaataactgtcaaggacttttaatattgacgggatttgaggaagggatttttcttcccccacaaggagggaaatttgacgctgatggtatcagagctattgcattgaagattactcataacgagtgcgaaagcgggtcatcctgtttctctctacttcagtttcatatgacggtctacacttttaaacatagtgtatcttcattaagtatctatgcaatcaaatacttaatgtga

SEQ ID NO: 523 - DNA, 162 bp, Asteriusvirus sp.
  source 1..162: mol_type = genomic DNA
atgtctatcaaggaaccaccagctatcctaacgtggttctttatacagccgcattgccgtgaggggttcaaactatgcccacatctaacgggtttcttttgctgttcgcactgtcggactgctcaactgccctctacgttttcgagtggatcaggtacatga

SEQ ID NO: 524 - DNA, 111 bp, Asteriusvirus sp.
  source 1..111: mol_type = genomic DNA
ttggcttatgccaacctttttttatgggatgaagtaaaagtttgtgatataattatcttgtacaattctgttggcatgatattcatgtacctgatccactcgaaaacgtag

SEQ ID NO: 525 - DNA, 966 bp, Asteriusvirus sp.
  source 1..966: mol_type = genomic DNA
gtgaaaaagcttgatttaaatacaattgccgaagaagttctggatgaatgttttgctaatgaagaagtcaacacactagaagccttagatttcgttgaagataaagatgaaaatgaaggtaaagtacaaagcagtttcaaatataatattacacttaagcgaccaccaaatgtttccaatgaagatctaattcgtgatattcaagctggtatcaatgtaaagaaaaacactgaactgttagttcgttacaattatggacttattattgatgtagcaagtaaatgtacttgttatatcccatttgaagataagatttcatatggtgttgaggggttcatgagagcactaaaaacctttgatcttaataagaatgttaagttcattacctatgcttcttctagtatttacatgacagtctataacgaaagttctgacgctaactatatggtacacttcccacgttatatgagtgttcataagatcaaagtaaaaagattctgccaggaatatatgcgtaaacatggtgttcgcccaactcctgaaataatctcagagggtactgggattgagattcagcatgttaataactgtttgttatttcaaagcgaatacacttctctggatgcaccattagacggtgttaccgatggtacactaggtgacattattcattcacctgcttctgattttaacctcaatgttgatagtattcgtgcacctttacgttatgctatcaatgaactgactaacgaattgagtactaaagaacgtgagattatccagcgtgttcatggtctaggtgaatatgaacctgaaacgcttcgtgagattgctgataatggttttgttgatgataatggaaaatatgttaaatcccgttcatcaatacatcgaaagtacagtgaagctatgcaaaagcttaagaagctagtacttgcaaaagggtacgaatacgaagatttctaa

SEQ ID NO: 526 - DNA, 498 bp, Asteriusvirus sp.
  source 1..498: mol_type = genomic DNA
atgacaactgtttatattgataaacgattaaatttattgattaccgattctagagttacgtcaactataccacgaaacttatttggttttttcccactaagaccaaaatatcaatatggagttgttaatcaaaaaactttatatgtacatgaccgtttattcagtgctagtgggtcagtaagtgaaattgataaagtactggattggttaattaataaagtaccagttatacctgacagaaagttaagttgccattgtgtgcttctttctaaagattatgttattcatatgattttaactaaaggaaagtttattaaaaaacttgaatatctacatgaagactacactttctttatgggtagtggtggagaatacatgctagatgctgctattcatgaagaacatacaactttatatgataaagtgtttagtactttcatggatgtgcataaccatgattgcttcacagatgataatattaatgtatatcgattttga

SEQ ID NO: 527 - DNA, 420 bp, Asteriusvirus sp.
  source 1..420: mol_type = genomic DNA
atgattacattcattcagtacttaatcattaaattttttggctattatacgattgagggcaaagctacgcttgcacataaaatctttgtagcattatgtacgggtgattatgacgtattgaataagtactgtaaatctaaagaatgtattgatataatggcacttcgtatctatgagtgccgaaccaatagatacaatttttaccagtacagatttgataaagaagaatttgatagcatcaaaatgctaaagaatttatgtaacaataaaaagaatatgcatatatcagaatttgttgctttgtatttttatttaaaaagttcattgtatatgaacacgatgcaaagattcgatactagaattaatgtattcaccgataaagaattttatatatacgataaattcttagataaggtttaa

SEQ ID NO: 528 - DNA, 261 bp, Asteriusvirus sp.
  source 1..261: mol_type = genomic DNA
atgaaatctattctcgttgcagttaacctggttgcttccccatctttcaacttcaaacaagttgttgctgataatctgaagaagatctgtccaaatgctgaattgactttctgtgtatttgattcagaaaaagtaactaaagttgatctaaactatcttttgaacgaagtacaaagcgtttctggtgaaagtaacttaaaagttcttcatgagattgcagaagattatgatgacactctagtaatttcggagaaattctaa

SEQ ID NO: 529 - DNA, 252 bp, Asteriusvirus sp.
  source 1..252: mol_type = genomic DNA
atgaacatcgataaggtcaaagaacttagtgctgcactaattaagaatgaagaagtttgtgaagaacttcgcagtactatcaaagttgagtacgcacgactccaaggtatgcttcaagaatcagaatgggtagtaactaaatctatcgaagcaatctataaggatattgaatcccttttcaacaagaaaagtaagattgaatctgattcatataacaaacgtaaagagttatctactgcacttggtatctaa

SEQ ID NO: 530 - DNA, 426 bp, Asteriusvirus sp.
  source 1..426: mol_type = genomic DNA
atgagaggctataataagatttgtatttttgtatttttagtttgtgcattcaattcgtttggttactactgtacagaaaataatatttcatatggtttaaatcctttgtggtttacaatttccaatgtagcacaaattggtattgctcttatgtctgcacttatgttctgtccaattgtcactatggatactgatcatgaaaggcttggatttctccgtgatactggagacgaaccttacagtagattgattgtgttgtatccatttattgttattttaggtactaacatccaacttgggtcattatctaatagtgttacatcagcagctattgctatatttgcattcacattttttatggtacacaaatcagtacttaattggtatatcacaaaaatggcagaagaaggtactaaaaatacttga

SEQ ID NO: 531 - DNA, 423 bp, Asteriusvirus sp.
  source 1..423: mol_type = genomic DNA
atgttcacactaagtaatgcaaaatatctttttcttattagtattattggttgggttgtggctccagtgctaaatgcactggggttttccgatgaacataaacttttaaatgtttcaggtttaattcagggtatttcatggtatacattaattacattttcagtgtgcatcaatacatttgcccgtgatcatcgacgtttgttatatctgaaagtatttggaactacccgatatagttttgtttacactttcattttagtaccgtgtatgttatatgcatttgtatttgattactatacatatctatgggtatgtggaactatgtttgttatgttggaatacatcagaactgttcaaaactcatatgcagatgagtttcatgatctagaagttaaacgaaaattaacggagctaaacaaatga

SEQ ID NO: 532 - DNA, 459 bp, Asteriusvirus sp.
  source 1..459: mol_type = genomic DNA
atggatgtattagctacaaatttcaaacgtaacacagaagagcgtgaaggttatttgagtattagtgaagttgtcgatgacaattttaaacaatacatttttaatagtgcaattaaattaaaatgcacaaaagattcacctgatcgtagctttactaaatggattgcatattgggaggattcaccagttgcaattgaaatgactgtgattacaacagtacttgaaactggttacatcaaagccattatagttgataagaaagtccgtactcttgatgaaattaatccatatccagcccgaaattctaaagtttttggtgtgttggttgatggtaaatttatgatagaaaaagatgcaaaggaatatgtaattaataaacttcaaactacatcagaaaaaaaggaagtagtggaccaaaactctgttgatgcaatcaaaaaagcatggggactaaagtaa

SEQ ID NO: 533 - DNA, 477 bp, Asteriusvirus sp.
  source 1..477: mol_type = genomic DNA
atgttaacaatagtgttgttggttagtccatttgtgtattttgtgctgtataatatttttagtaatgctaatcattttaaatatgcacaaacaattgcaaagcatgaaggtttttggaattttttcccagcattactatgctcatatctataccatgaacgctatttcatttttcctgaatataaaaattatggttatgattctaaagtaaatggtataattgagtactgtataagaaattatcttaataataatgataacgtccaagtaagaataggaaatggtaatatatcaagaatagttttcatacctgatatacaagacccaatatacttatatccatatgtttatagtattagtgtaggttgttcgatacatggtagtaaatctatgtacgattattttatcttaccaccaacacaaattagattaatagaaaaatatttgagggaaaagtttgacaacaaagattcttag

SEQ ID NO: 534 - DNA, 150 bp, Asteriusvirus sp.
  source 1..150: mol_type = genomic DNA
atgtattacttctatgactccagaatttctgacacagatatgatggcagggaaggttgataaagaagaatttctacaaggctatgatatgatggacgatgacaaaatcatggaatgcgttgaagtgtatgaaaaatacagaggcttctga

SEQ ID NO: 535 - DNA, 270 bp, Asteriusvirus sp.
  source 1..270: mol_type = genomic DNA
atgtttaagaattttatggttatcgtagcagtactgtttggtacatcatgtttcatttccccagtacacgcagaagaacaacgtcaaactattaaaactattgggactggtaaaactcccctaaacgtactgctgaagaatacatgcctgaaatgcgtgaacgttatcgtcagacatacagggaaaaacatgctaatgataaacccatcaagaagcataaatgggaagttgttaaatctccttcattttgtgctggatatgctaaagtaa

SEQ ID NO: 536 - DNA, 228 bp, Asteriusvirus sp.
  source 1..228: mol_type = genomic DNA
gtgattactgcaactgtatatcaagatatcaatgaagaatttcattctaaaattgcgttcttatcatttcctgtactcccagcagttgggtcaacgttgaatcttaccatttgtggttttgagaaatattataaagtactagatattgagtactgtgctgatgtatattcatgtaatagtgaaattgcaattccagtatcaatcgatattattgtaaaagaggtttga

SEQ ID NO: 537 - DNA, 585 bp, Asteriusvirus sp.
  source 1..585: mol_type = genomic DNA
atgaatgttattgataatagattagtactgaaaaatggaaaaatgactgttaagttatataaagatgaagctgattctttcatggcaaaagcgattgaaaaatcagaacgatataaacttttggctccagccagtaaatcgccatatggttttaatcatgcacatagtcattttgttggtatggtatgtgagcacgcatctttagtactttttaatgaaattgaaaacaatactggtattaaacttaatatcgatccagcattccaaaatgaagcacgtgacggtgaatgtgatattaaggtaaacaaccttcgtattgaagtaaaaggtatcaagtataaatcatggactgactttggaccatgtgttagtactcgacagttaaaaaatatccagaaaaaagctgacgtaatactatgggtattgtataatgagaaaaaacaagagttcacgtttgagggattcaactatgtaaaagatattagttctatcccagttatcctcactggtgtaccagggcgaccaatgattgaaaatcacccagtactcggtattatgaaaccactacaggagttaccattgtga

SEQ ID NO: 538 - DNA, 1155 bp, Asteriusvirus sp.
  source 1..1155: mol_type = genomic DNA
atgtcaaggtcaattgctgcggctggacgctataagtttggtgaatgtggttatgttgttgatggtgcaatcctcaacgatggaactagactaaaaaatattagaatctatcgccaaagaagccatagattatatgatttagttgatcccagaactaatataatatatcgtaaagtacaaataacaactaaagataataaaggttatctattaaattacaataaaactaatgaccaactattaagtgaaattaataaaaattgtttctttgttcgtggatattccgaagagccacaagaaactgatactggatttgtatataaattcatgctacataaaacaattttaggtagttcacaaaccttgtatcatatgtatacacctgaatgtggtattatagatcgtgatatagataacattctcatttcaccagtatttgttggtaatgactcaattagtggtaaattattcaatactggttcagaaattgataccaatggtatggtaataacaatcgtattaccagacggaacagaatactttactacccaatttgttaatgatgcatttacaattccagttgatgttatcacacaatcaggaaaaggtactgctacactcacttctccatattataacactaaagtggtggaatttgatgttcttgaaagtggagaagatattgattttgttacatcagttcttctatcccaatttgaacctgtttcggaaggtgtattttctgcggttgttccatttgatgttcatgaacgtggacagtacttagcacttcaagcatacagtggtgacttatatcaagttggtgtagatctttctgtagacgcagaaggtaatattactgtgtatcaaactgataatttacctgtttctttgagtataatcggaaaaacactgcatactactcctttccataaagaatatactttaagtgagtgggttctcggtgaagactctatgtactctatctcagttccagtaactgaacatggtaaagcactaccacaagttcaattatattcttcagacaatcatgtagttcatagtgaaatacaagtggatgaagatgataatgtaattcttaaagtagtagaaccgcttgactgctcagtcgtaatagttggttacaacgcataa

SEQ ID NO: 539 - DNA, 789 bp, Asteriusvirus sp.
  source 1..789: mol_type = genomic DNA
atgagcaacattttcttcaaaactatttctttcaaaaaagcatcttactcctacgcctacgttgatggtaaagtgcttaatattgtactggatggtgttgatgtaccagttgaatttaaaacacatgaagaagcagttgaaggtgctaaagaattgaattcaattcttaatggtgaagtaagtcaaaaacaaaatgtaaaatctgatttagatgtacttttggaaaaaatcaaaactggtgaagtattagaaattttagacaactgtaatgaaaaacttcgtaatgtagttaataatgttcgtgaccagattcaagaaaaagcactagagcaagcattcaaacatgtatccaagaatgctgaatctcgtattgatggtatggttaaaaatcttgatgatgtactatcccatctctttactaaagaatacgaacaagaagttgaagaagaaccagtaaaagaaaccaaaaaagaaaaacgtagctttggttcaggtgatgatgtatttggttttacgaatgtccgaacaagtgcagatgaaccaaaagaaattagtgagatgctcattggtgacatgacaactaagcagcttcgtaatgaaattgacaagtttgtaactagttgtatcaaatcagaacgtgcacaaagtatgtttaaaagcattagtgagaactttggtccagaagcaactgagcaggcactaactgcatttaaagaattgatttataatgtagccattagcaatccagataaaacacttgaagaagttctacgtgacaatttcaaataa

SEQ ID NO: 540 - DNA, 342 bp, Asteriusvirus sp.
  source 1..342: mol_type = genomic DNA
atgaacttaagttcaacaattcagtacttgagcagtaacttcgagaaaattatttctcgcggtgggatgattgtacacccagaaacagaggaaatgtacatcattggatttgataaaaattcttatgatcaagtacttgtaatttccaagttagaaagttataatgaagttgttcagttttgctgtaccgaatttggtatctatattaaagacgctgaaactaatacgatttcgcattatttttatcacacattgatgggtactaaagatttcggtttgaagttcgatgatttagtacaatgtcactatatgtttaaaaccttcccagctagtgggcactaa

SEQ ID NO: 541 - DNA, 111 bp, Asteriusvirus sp.
  source 1..111: mol_type = genomic DNA
atgaaaaagcaagcatatagaattttagaagacttccatctaaaagcatttataatgaagttctgtacagatgaacatcttaccggacgagtaatacgtaaggagttgtaa

SEQ ID NO: 542 - DNA, 372 bp, Asteriusvirus sp.
  source 1..372: mol_type = genomic DNA
atgagcttgataacatttacaattatttgttgcattactattgtactttgtcgcctgattcatgtatactcatatcataaagcgttgcgaatcgaacaagagatttacaacgaaaaccgagaaccagaaccagtcaagaagccaccttccccttatgggttgaaacgtgagatgcattctcaaagtaaaaagtggggttatgcaattactaaaaatggctacatctatactgcaagtaatggttattttcaaattcaccacgaattagaagtggcagttcaaattttgtgggagatggaggacataggtggttatgagcgtactaagtttgaattcatatcaaatgatccaggaacttcacgagaaacatga

SEQ ID NO: 543 - DNA, 420 bp, Asteriusvirus sp.
  source 1..420: mol_type = genomic DNA
atgaaaacaatcaaaattcatttcaaagacacttggacagaagtaagtactggtaatattcaggatattttatatagtactgaaactattcatgtttatgatgaagaaactgctgccgagcagttaaaagttttgcatcgtagtgttggtgagcacactgaatatggaattaaacatactcgtgaattacttactactaatcacattgaaacccgtaaagcaaacttatcaaaagaagaaatgtttgatttcatcctgaaccataaagttcatattgaacctgatgggtcgatatgggagaacactgctggacaaaaagtgctgaaaaaatatcatgtttctattgataatgtaaaaatgtcagggtatgatttggaagatgcaattaatgaatatgtatctaggcagagggcaaattga

SEQ ID NO: 544 - DNA, 447 bp, Asteriusvirus sp.
  source 1..447: mol_type = genomic DNA
atgcaatttaatggtaaagtttccaaagtaggtttggtttttgaaaactgtgaatttgttgatattgatgtaaagaatgttttatggatgcatattgctgatgagaagactctttgtagccgtttttcaaacggactgacaattagtactgttatcggtgagtttggtattgctttacgaagcaatacaccatctgatttcatggataactctacattgttggaacgtttgaaaatgcgtgacgtgacacacgtttatctttatgatactaacggtgttattcaacgttatgtagtcgaatgggctgattacaaccttaatgggcaatattcagttaaccagcgtgttcaactaacgccaggtggaaatattgtgtttgttagttcaactggcaaattaatcagtgtagatgataaaaacattgacctattcacagcatataactaa

SEQ ID NO: 545 - DNA, 453 bp, Asteriusvirus sp.
  source 1..453: mol_type = genomic DNA
atggtatttttgagatttcacgaaacatacgaagcaggaacacaaatgtctaatattttaaatgaaaaaacagttgatgtggctattggcgttcttaacacaacttcatttcagaagaaacacagtgttgtatactttggtgaagattgttggctgagctatactaataattcgtttataattcgtgtagaggctgatgatattggattaaccgttcaggtaggatataccaaaactggtaaacaaatcactgtcattgtcgataaacttacgtcttctttttatgatagtataaatgattgtgaacactatagttcaacattttatgataccgaagaagaacattttatggatagtactgttaaagagttagctattccatataatctaatgaaagccgtgagtgatttaattttaaaatataaaaaaataggagttactaatgcaatttaa

SEQ ID NO: 546 - DNA, 429 bp, Asteriusvirus sp.
  source 1..429: mol_type = genomic DNA
atgggaagtgaaatgttaaaaattccacctaagtcgttaacacatcttattgaatgtggtgtaatattttccgaaggtgatacctcatcatacacatcggtcgatgaaccttataatttttcataccaatcttataaaaataattctaaaatttcttgtagagaggctgaaaacatattaatagatgtttcgttacataatgttccgaaattttacattgatatctttggtgattctttgacaattcgaacatatgattattttattaacaaagacctcttgaatcttccaattgaacatgatagtatagattcagaacttttctttcaactatcaactgtttatgatttacagggtttaactgttgaacagttgaatggtatttttgagatttcacgaaacatacgaagcaggaacacaaatgtctaa

SEQ ID NO: 547 - DNA, 420 bp, Asteriusvirus sp.
  source 1..420: mol_type = genomic DNA
atgagttatttgtttactttaattgataagtatgttgacattgtataccgtcaagtttgtagtgatacgtttgaaacaaaaaacccaattagagatggcatttttgatgttgctgttggatcatttttgaatgggtacaccgagtcattatacaacagtaataatatttttatttcagttcaatcaaggcatacatcagactatgctgttagcattgatatttgggaaaataatatagaaatagacataacggaacatactaacatttgtgttgatgatacatttaatcaattaactgaagaaatgtacttgcagttgaattttgtacatgatcttacaaatatcagttatgatacattaaggaaaatatgttttcttagtggggtgattcgtagtaatatgagtaagtatgggaagtga

SEQ ID NO: 548 - DNA, 108 bp, Asteriusvirus sp.
  source 1..108: mol_type = genomic DNA
atgtatagaagctatcactttttacgtataatgatattaccctcaaattcattatattcgttaccctctaacagtatctttttattcctcttggatgctgtaatttag

SEQ ID NO: 549 - DNA, 285 bp, Asteriusvirus sp.
  source 1..285: mol_type = genomic DNA
atggaattcattgttgcacctgatgaacttaaaacattcacgttcagagataataacaattatccttatacaaatcattcattgaattcattacatgttattgcaatcattgcatctgaatacagggataatccatgtattgattttaaaaccactgatggcgaatatacatgggtgatcccaaaagataaatatagttatcaaggggcagtagaaattcgtgactcgattctaaaacaaatcgaagatggaaatactcatcctaaactaaacactcagtactga

SEQ ID NO: 550 - DNA, 192 bp, Asteriusvirus sp.
  source 1..192: mol_type = genomic DNA
atgttctggaatttattatgcttgtttggtcgtacattggttcttgctattattcatacacctggtattcgtaattatgtttcttatgaatttaagaaaaattatcacaacaatactgaagtacgtgccactaaaatgtgcaaagacttcaaggtagatgttccaccattcaagaagtacgaggatgaataa

SEQ ID NO: 551 - DNA, 366 bp, Asteriusvirus sp.
  source 1..366: mol_type = genomic DNA
atgactagtctaatagtacgtataatgcaagatgtttgtaataacctttatacaggcaattttgacgatccgaacataaaaatattatgttatgatggttttacaatggtgcatccagcctattcaaataatatctacgtagcatatacaggtgaaaatctattatatcaatttgatatatatagtacaatgacaaagataattttggatgcatctaaaccagcaatctttattgcttctcatgattaccattacactgaagaatcactatttcagtactcaatgattaatgacattggtgggttgacattggatgaggttaatgctatactagctgtctcacgtttggttaaaacccacaattag

SEQ ID NO: 552 - DNA, 426 bp, Asteriusvirus sp.
  source 1..426: mol_type = genomic DNA
atgaaatacaacattgttagaatggtgaactatgtattaaaaaacaacgcatggtcattgcatgatgtacaattagaagatattggtgaagttagagtattttgctatgatccagatttgaatcaaaccacagatttgagtaaatgttttaatatttttcttggttatgaattcaataatcatttttattcatttgatgtgtattttgaaaaagttatattcagaagttatgaatgtgataatgaagattatgattatgatgacgaatcaattgaattgaatgttaacgatattgatactgaagaaaaattcttccagtactgcctcgttaacaacacattaggattaacatttgatgacattagtgctatccttaaagttcaaagattgattccagaagaggtattaaatccgttaaatgactag

SEQ ID NO: 553 - DNA, 114 bp, Asteriusvirus sp.
  source 1..114: mol_type = genomic DNA
atgaaagtaagtaaagaaactaccaagcagcttgaagaactttgtagtgctgcacctatgccgactcttggcttaatcaagttgatgcgtcgaaataagcaaaattcaaaataa

SEQ ID NO: 554 - DNA, 216 bp, Asteriusvirus sp.
  source 1..216: mol_type = genomic DNA
atgctcagttcacctttagctaaaatggtcactgtagaatattgttgcaacagtattcagtactactttttaattgacataacatcatttgggtgtataatgaagcgtaaacagaatcttagtaagaaactacaaccgacaatgacgaaagaacagttgtcaacatttatcaacgcagcattagataaaagtaagagtaaaaatgaaagtaagtaa

SEQ ID NO: 555 - DNA, 90 bp, Asteriusvirus sp.
  source 1..90: mol_type = genomic DNA
gtgattcccgattcagtagttttaaagctgacccgtatgttcctacacattacaactagtgcacatttaaaacctagacgtaggatgtaa

SEQ ID NO: 556 - DNA, 216 bp, Asteriusvirus sp.
  source 1..216: mol_type = genomic DNA
atgaaagccaaagacctaattaaaattttacagaataatccagaagcagatattcttattcatgcttcgccttatgatgactatgcgattggtaaatgcgaaactgctcattcatatcaagcaggagacacagatgttgaagagtctggtgaagatttttcagattcatttgatgaagatggaaaactattagttccagtcatcattctctcttaa

SEQ ID NO: 557 - DNA, 402 bp, Asteriusvirus sp.
  source 1..402: mol_type = genomic DNA
atgaaaaagaatgacttgatcaaaatgcttcaagaaattgacggcaatccagagattgttatttggaatggatacgtcgatgattatatgaacatcgaaaaaggcttgactaaaatcactctagtcaaagaaaccgaacagtttcttcagggtgcattagagcacgaatggtgtgaacgtaacaatacattcgacattccagaagaccaacgaaccaagattgcagaacgtgctaaagaactgcataagaaacgcgaatacgatttccagaacccatatgtcactgaagacgaattcaatcgctggtacggtaaaaagaaattgacaaagtatgtcctttcacctaaactacgtggtaagacttcacttggtgtattcaacgccgcagacttaaactactag

SEQ ID NO: 558 - DNA, 258 bp, Asteriusvirus sp.
  source 1..258: mol_type = genomic DNA
atggcatatttcttgattcaaagcgatgctgatgatgaattaatcgctaaaactaaaattgatattgatgattaccgaacagtactggatgctattcattactatgatgttcgtcacaaaggtaatcgtgaagaaattaagaactggattgaatcgggtgagtacaaggttgaatctttatctatttcaggtgatgaaatggaagaagatggtttctttacagaaacaatgtacttaactattgaaaatcatttctag

SEQ ID NO: 559 - DNA, 186 bp, Asteriusvirus sp.
  source 1..186: mol_type = genomic DNA
atgcaacttttaattctttcaatattgtatattattataatggttcctatatcaatacgtttaattatacttgaacgatttttatcgaaacatggaaatagatctatgatctttgtaccaatcggtctgatattgtttggtatatttgcatttataatgggaattaacgctacattcatttcatag

SEQ ID NO: 560 - DNA, 564 bp, Asteriusvirus sp.
  source 1..564: mol_type = genomic DNA
ttggctgtacaagcaggaagatatctaactgaagatgaagaagcagatcatattgatgaagattgtacaaatgatgatttaacaaatttacagattttatctgttgaagaacataaacaaaaatctattgcaaatggtcacaaagcaagctatgatgagtttatatgtatgtgttgtaataaaaccttccaacgtagacataaccaagttaaatcatatacaaaatattgtagtgtagaatgtacaagaaaaatggttaaacccccaactcagacgaatggtgaaagtactattgattacactaaagtacaagaatatattgacaaaggtttattagatactgaaattgctaaaattatgaatattagcaaaggttcagtactgaattatagaaccaaaaataacataccatctaagaaatttgcaaccgtaaaacgtttagaagataacatagaagatatcaaaaaacgtttgactaatggtgagaaaaaagttagtatatatgaaagctatggtgcttccaaaaatgtgtttgctagatttttgaaaagacatggcttgtaa

SEQ ID NO: 561 - DNA, 114 bp, Asteriusvirus sp.
  source 1..114: mol_type = genomic DNA
atgaaaataaatttagaatatccatataataaggactgggattggggttatcttgtaattaatcctgaaaaccgtcgaacagtgattttatacaaatcacggacaaaaaaatag

SEQ ID NO: 562 - DNA, 435 bp, Asteriusvirus sp.
  source 1..435: mol_type = genomic DNA
atgtcccacttaccgctccaaatttcacaacttacgtatagtgaggtttatgtgattattgaagattcatcaaaatatgaagagtttttaaaatcgtttttaaattccaatttaacatcaaaagcttctaaaaatgggagtgaagataatcctgaaattcgaatttttaatgaaaatggggaatcatttattattaatgataacgaaattatttttgaatcattagaagaaataaaagaaataaaaaaactaaaaaaaccctctttgcaagatatagtaaatagtttgagtgctgagtacattacattccagttaagttctgatgcagaagatgaatttcagaaaagaacagtatatgaaaatgtgtttccacatgaattaaattctgtgatatttaaagtgttggataaggttttttctgaaaataacacttga

SEQ ID NO: 563 - DNA, 354 bp, Asteriusvirus sp.
  source 1..354: mol_type = genomic DNA
atgtttagtgaatatgaagaagcaataaaacgcaaccttgaagattataaattccaattttatatttgggataaactgatgagattgtgtttacagtggatggaaaatgaagaaactcctgaccaacgaactgttatattaaacatcttgttacataaagatcttagttcaattaatattgaagtttctacttatgtaggagaagattataatccctatatttcatatacttcccctgtaccaaagacagaagaagaatattttcaaatgagtactgtacaagaaccattgttcacttatgagttctataagtacttgattggtgaattcaaaaaaatgcgaattaattcttga

SEQ ID NO: 564 - DNA, 165 bp, Asteriusvirus sp.
  source 1..165: mol_type = genomic DNA
atgacacacgctgactggttgaaactccagaaattaaagtggaatccttattgtctatcattagatcagaggatgtgggatgttatacgtgttaagtgcatgtacaaagcattcttaagtactgaactagacgaagaagtactgatgaatattgtgtacagatga

SEQ ID NO: 565 - DNA, 195 bp, Asteriusvirus sp.
  source 1..195: mol_type = genomic DNA
atggtttgtaatggagttaatgatacgctcatgacccatgaagaatggttaagtgatctaaatttcagatactctggtataggtaattggcgaaagtatcattgggaaattatatcagacccaaaagaatacgataaacttataaacttccaagtatatgaatggttctttatagaaataatggtaagaaaatga

SEQ ID NO: 566 - DNA, 168 bp, Asteriusvirus sp.
  source 1..168: mol_type = genomic DNA
atgacacatgaagaatggatcaacgatctaaaagaaagatatagtggtgttgatggtatatgtagaacataccactgggagtatattagtactccagaaaagcttcaaatgtatgtgttgaatggatattatacatggtttgtaatggagttaatgatacgctcatga

SEQ ID NO: 567 - DNA, 537 bp, Asteriusvirus sp.
  source 1..537: mol_type = genomic DNA
gtgaaatgtaaaaattgcaatcatgaaacttctaataaaaaattctgtagtcgttcttgttctgtatcatataataataaattgagaaacgtaaatggtaatactcgtttattaattcccaatacagaatcatctttatctggtgaattttgtataaattgtaaaaacaaaataccagaaaatcatagaaataaaaaaatatattgtaaccgaaaatgccataaagaacaccaatatacacaaaatgtagagaaatggttgaatggtgtgcatcctgggtataaaggtaaaacattaaaattatgttcttttgttagaaaatatatacatgaaacacatggtactgcatgtgagaaatgtgggtgggatgaaaaacatccagtagatggtgctgttctaactgaaatagaacataaagatggtgatgcatccaataatgaactttctaatttggaagtactgtgtccaaattgtcattcaaaaactgcgacatacaaagcaagaaataaaaattctgctaggaaacgatatttataa

SEQ ID NO: 568 - DNA, 105 bp, Asteriusvirus sp.
  source 1..105: mol_type = genomic DNA
atgcggtatcgcaaggtgcgaggtgaaacttccgatttccactgctggtcgtttcgattacgacataccgctcaaaaaaatcttggacaactcaaaaagatgtga

SEQ ID NO: 569 - DNA, 177 bp, Asteriusvirus sp.
  source 1..177: mol_type = genomic DNA
atgacacatgaagaatggcttgatctattaaagaataaatatgatcgatttggtaatggtattattgatggtcattacgatattttacgcaataaatgtaagttcgcatgtagtgtactagatgaaaacagtaatcactggatcatcttcgaacttgcggttagagacaaaaaataa

SEQ ID NO: 570 - DNA, 504 bp, Asteriusvirus sp.
  source 1..504: mol_type = genomic DNA
atgctcattacgcatgtaccggaaagtattactgaaattttaagtaaaattaatgttaatgagtttgaacgaaccgttcgaaaacagggtacttatcactataagcacaaagatggtgatcatcaaataagcttagatcagaactatcaaactctaacaattaaaatggttactcgctggaatttcgttcgtaaagacactattatctgtgattttggtaaaaatctacttagaaaatgtttctctgaaacaaatggcatctatccaaacccgaatagaatttttacatatcgatacatcacagatgaagatgtacatttccaagagagtttggtatgcaataataagtactttcccgcattttctgataatttgaagttaaaagaactatataactatttcttaaacgacaatatcctgtgggatgaagaattaaaacaacgacaaatagaacgtgaaaagaaaaaagtctggactggctcacattggatgcaacgtaaatga

SEQ ID NO: 571 - DNA, 183 bp, Asteriusvirus sp.
  source 1..183: mol_type = genomic DNA
atgacacatgaagaatggttagatgaactaaaattcaaacataatcattttggttttggtatacgccaaggtcattatgatgtgttaaaagataaacaacttttcaaatcatttgtacttgatgaggatagcaatcactggttcatctatgagcttgcggttagagacaaaaaaattgactag

SEQ ID NO: 572 - DNA, 162 bp, Asteriusvirus sp.
  source 1..162: mol_type = genomic DNA
atgaaatatgaacatttaaaatactatgctgatagaataaattattatcccttttatataagattagatgcattaatatcaaaaaaagttgtatataaacgttctcaagctgatctaaccaatatagcattcattcttgcagtactgtctaaaatgggataa

SEQ ID NO: 573 - DNA, 99 bp, Asteriusvirus sp.
  source 1..99: mol_type = genomic DNA
atgcacttggtaagtaataaagcgtattacgatgcattctttgggaaaaatgctacaattgaggttcatgtgtattatgctattacatttggtgattaa

SEQ ID NO: 574 - DNA, 153 bp, Asteriusvirus sp.
  source 1..153: mol_type = genomic DNA
atgcattacaatataaatgcaggtgatgtatacttctttaagttggagttgtttttattgttaaatgatcccgaatcgtactataacaatatcatttattgtgatgattttagtacatattttagtattgcagttatggatataaaaagatga

SEQ ID NO: 575 - DNA, 405 bp, Asteriusvirus sp.
  source 1..405: mol_type = genomic DNA
atgaataacgaagttcaaattatcataactccacctatacaaagtcttgatgtatctattagtgattttttagaaaaatattatgaatggtttaataatgataatatcatttataatcatacattaccagatggtttcgtggagcttatagaattaaattcaaaatcactatacttctgtgttgaatacaatgattatatgacagatgaagcttatcgttttcgttgtacattgtatccgaattatttttcaataggttataaagactaccagtactgcaccactaactacagtgtagaggaagaatttcagtacaatttactttatccagatttagattatactattgcagtactgttatctaaaattatggatttttataaaggtaaatacagtgcagcctaa

SEQ ID NO: 576 - DNA, 489 bp, Asteriusvirus sp.
  source 1..489: mol_type = genomic DNA
atgccaattcgtggtgtaccagaaccattaatggaagttattaagcatgttcgcattggagatcgagaagttaatcttcgccgtaataacatttattactttaaaacttcagaaatgagttctgtacagattgtcattggtacatctattaagattactcgtgtacttgatggtagtactgatttcgtcgaatacaacgtacttactaacaaagtaacacacacatataaatggagtgggtataaaactattaagtatgagtttgatgttgctagaactgaagaagaacgatttatgttaagtactatcaatccagcaaactaccctgaacttgatacatttttgctaattttaaaactgtataatgaagcaaatgggaaagctaaggagtatgatagaattatgtatgaacgcaaaaaagaacgtgctcagaaaagttatgatctttatgataacccatatgtaaaatataataaggggagaaaatga

SEQ ID NO: 577 - DNA, 219 bp, Asteriusvirus sp.
  source 1..219: mol_type = genomic DNA
atgaaatttattgattttgatatttctaaggccaaagaattatttgtaagaaatgaagtttatgatatcatgttacataacggcactgtacaagaagatgttgtgttgttttcgtttgatggtgaaaatctcgaaactatatataaattcagcaacttagatggtgacttttgggaaaccagtgctgttaaaatgtatagaattaaaaaggagcattaa

SEQ ID NO: 578 - DNA, 393 bp, Asteriusvirus sp.
  source 1..393: mol_type = genomic DNA
atgtctgaatcagaactacacgaaatgatagatttcatttatgaaatggtgcaagataaaaataacatcaatacaattactactggaccaagacaaattggtaaccaaatgacctattcgttgtctttatggttacacccgaacttcaaggttgattgtttgtattaccgtcctgatattgatgcttattattttgtaaatcatgatgcattaatgaaaccaaataagcgtacagttgatgatacctttgtgacacacccattttacctggctgattccgaagaagatgagtttcaaaagaacacaacgttaaacccaggtgaaatttgcatccctcacgaacttaaagataaaatgaatcacatcacagaagttatgaaaacatgctggtag

SEQ ID NO: 579 - DNA, 150 bp, Asteriusvirus sp.
  source 1..150: mol_type = genomic DNA
atgagtaatcaaaaaatcgacttagtagtaaaacttcaagagattcaagcactagctaaagaccttgataacacacgtgcatcagtagttgattcactatgtgcaacaatcctgactgtttttacagattacgaaaagaaatctgattaa

SEQ ID NO: 580 - DNA, 291 bp, Asteriusvirus sp.
  source 1..291: mol_type = genomic DNA
atggaaccagaaaaatcaagaaaaattcttattgatgtccaaactaaattactagatattatggaaatcatcaatgagttaccacagggttatcagtacaaagttcgtgaaatgttatcttgtgccgaaaccgttgtttctatgtacgatgatattcaacatggtattatccctgataatctcaaagatgacgtaaatattaacactgaggtaaaagaaactaaattagaatcagaaacagtatctaataaaaaagttctagaccttagtggtataaaaattaatatctaa

SEQ ID NO: 581 - DNA, 507 bp, Asteriusvirus sp.
  source 1..507: mol_type = genomic DNA
atgagtgttgaatattggtttttgtttgtgtgtattggtacacttgcattaatcaccattggattgattttcaataccatgattagtggaagtaagtactttaagacattccaacttttaatgtctgctatgccatatagtgctgatgccgaaaaaacaatttctctaattttagataagttcgatgcaaatcttttggtggctaaaatttcagcatgtgatacaaatatttcattttacactgtagagacagaacagaatgggattgatacacaatactcaaatccagtagttgctgaaattttcattggttcaaaatattatgcctatggatatgtaagaaaatattattcagaagcaaaagctgagttgacgaagaagcgaccatcaataaaaactttaaaacgcatcattgcgttggaaaaatcacttcgtggtcaaacaagcgttaatgagccaccatcagtgattaaatccaaaaaaagtaatgttgtggagttggagtaa

SEQ ID NO: 582 - DNA, 210 bp, Asteriusvirus sp.
  source 1..210: mol_type = genomic DNA
atggctaaagaaactaacgcacaagtactagatatcaccgacttcgaccgcactgtgaactacattcaattccagattcatcaagcagaagaagctctagcagtattccacggtactggtgcaaggccaatccgttttgctcacttgattgcatggaagaaaagtcttcaagaagaactatctgaactgcgtaaagcaaatcgtaagtaa

SEQ ID NO: 583 - DNA, 297 bp, Asteriusvirus sp.
  source 1..297: mol_type = genomic DNA
atgaataaacatgaagtaattcattttgatgataagatctatattccaaatattgatagtactgaaacatattacctaatcaataagattatggctgaaacaaatacgtgttgtcgtcaacagccaggaaaatatgagttctgtcagactattggttattaccgatatgatatgttagaatcatttacaattgataagtctaaagttattgacattcttgtacagaatggatataatgaacaacgtgtaaataatacagatttaccagtttcaaaaattgttctttctaataattaa

SEQ ID NO: 584 - DNA, 270 bp, Asteriusvirus sp.
  source 1..270: mol_type = genomic DNA
atgactaaagaagaaatgaaatctcgcttaagcgaactgaagaaagaacgtaaactagtacgtttagactgggatatccttaacaggaaagatgagcaatcatatgctaactggagttctgataaagtacgaaatgaccgttctaaagaagatgcaaagcaattcatggcattatcgaagcgactgtcatctttgaacagtgaaattactggccttcagaaagagatcatttccattcttaaagcggagattgaatcactctatgaataa

SEQ ID NO: 585 - DNA, 291 bp, Asteriusvirus sp.
  source 1..291: mol_type = genomic DNA
atgaaaattttagaagtcttgctagaaaaagatgcatctggtactctttatgttggtaatgagttcagtccagatccaattgatatgttacagagaatccaaacactgactcaaaacatctcggttaaaaaaccgtttcagaaagaattggaaatcttttgtgataaagatattgaacagcatgataatgtgatttcagatattaaaagtctattgacaaaaaatggttatgtagagtataatcctcctatcgtaatcgttattccagacttcatgaaaggaacaatttaa

SEQ ID NO: 586 - DNA, 831 bp, Asteriusvirus sp.
  source 1..831: mol_type = genomic DNA
atgtcattagaaaaaataatcatttctgaattccgaaagtatatcatggattgtgatagagatgtgcagcgtaagttcaatgagtaccttgacaaatatccgtatttgatgtttaatccgtttgaaactgatgatgatttatatcttggtttttacataggatttactcaacgaattcttcataaagatgaaatgaaacaatctgagatttgggtagaaactgactcatcagagtctaatgttttttatctttatacatattatgccgaaattgttagagatacgacacctgatggttgtctatttatacaatcgtctgatattgaaagaatatatatcgaacctgtatctttagatatggttgcccagcttccaactatccaacagttaggtgcagacgaattaacttattctgtatttgaatatctaggtagagatgatttgactcaagaaattgataaaatggtttctaaatatacttcatcacttatttcaaatggtaaacttaaattagaattaatttttgaagatactagtattaatccagtaagaggggtaacaattggaaaagttaccatacgtgttgtttacgataatgaagtattaggatatatttcaaaacgtggacatgatttatgtataattagtacattcgttgtttctcgtaaaaaatggaatgatttaatgcaaaaaatcgtggacggtagtaaaattcgtgatataatatgtaatgacatggtaattattaatcctgatgttgactgtgatgtatattttccagttcctggatttacacgagaaaactttagtaaattgaaggataagaaatga

SEQ ID NO: 587 - DNA, 198 bp, Asteriusvirus sp.
  source 1..198: mol_type = genomic DNA
atggaaacgattaagtttatgtttgaggtgtttgttgcattcatcttatgtgctgtgtctcttactattgctttaatcccagtaatcgtttaccaagttaatggtgggacagatccaacaattgatattttacttcgttgtttcggcttttttatatggttggcgatgtttatgtactacatgcatcttgaggattga

SEQ ID NO: 588 - DNA, 573 bp, Asteriusvirus sp.
  source 1..573: mol_type = genomic DNA
atggctggtgttgataaaatttgtgaattcagttcagattatgaaggttacgagatgtacaagtccaagcgtaatcacattcaagtactgtcaaagtaccgtaaagaattccgaggccacaaagcaacattgtatgtttttgagaatggatattctgaagttttcacaagtggtgggtacagtacagctaacatggcacatatcaacccaaacccaactgaagatgattggaatagtggtaacgcttttcgtatttcaattttgaataaaatgaatcgttacgaccgttattgtacattctttgaaaatatttcagaatacaagcaagcattaaagaaatataatcaacgcttactaatgaattatgattacattcttcatgtgccaactgttccaggtcaggttaatggtctgtatacgaatagtacacatgatttaactgcggtgaagcgtcgcctcaaacgtatgttgggttgtcgtaatctaacaatcaaggttatgcgtaatgaatcaatgtataactttttagatgtactacactacacactgaaggataataatggaaacgattaa

SEQ ID NO: 589 - DNA, 144 bp, Asteriusvirus sp.
  source 1..144: mol_type = genomic DNA
atggtatacactaacatttttactggtattatgcgtaaatttattaatggtactggatacgtatctaatgacaacggtagtacatgggtaaaaaataatacgtctgaatctttagtaaaaagtcttccgtattataaagcttga

SEQ ID NO: 590 - DNA, 171 bp, Asteriusvirus sp.
  source 1..171: mol_type = genomic DNA
atgagtctacgtgaatcatgggaacaatttaaagaagagattggttatcgtggtgttaagattgaaaaaatcaatcgaaccgaaagcatcaaagccagtactaatggtactacctatgatcgttatgatgaaaagtatggtttgcattctaaaccgaaggatactgaataa

SEQ ID NO: 591 - DNA, 144 bp, Asteriusvirus sp.
  source 1..144: mol_type = genomic DNA
atgccagtacgtaacagtacttcacgctttacgcttcaacagaaagcagatcttttgaatatggctaacaaagattctaatttttactatctagtactcggtgggtcagtagaaaagattgacctacgtgagtgtatgaaataa

SEQ ID NO: 592 - DNA, 444 bp, Asteriusvirus sp.
  source 1..444: mol_type = genomic DNA
atgacagtactgcaccaattgaagaaggttaagcatccagttgtatacgaggattggaaacgacagaagttgatgggtgatttttatttcccaaaatctaaagttcttgcgaattcaagatgtacatatgtcacacataatgataaagatacagtatttgttgaaatgggtttcaatccatcaaatacaatgttcagtactaaccagacattttacaaatttcatatcaataaagattcattttctattatgattataaaatttttagttgaagatctggtatacagtgaagaaagagttcctttatcattagtggatattccttatgataatttagaggaaatgtacttccaacagttgacagtgcaagaaaacttcggtatgataggacttcaagagttagagatgattaagcaaattcgtgatatctactttaaggagtaa

SEQ ID NO: 593 - DNA, 384 bp, Asteriusvirus sp.
  source 1..384: mol_type = genomic DNA
atgaaatacagcattgaagtacattacactacaggggacactgaaaattgttatgacgttcttaatacaattgatattcaatggtcttctaaagaggaagcagttgcagctttacagtgcctaaaagagcattgggtgttttatatgaagcaagataattgctatactaaagaacacgaaactatcgttgaaaatgctaaacaaaaagagtggtttgacccaatatcaccagaatattcattcttggttaaagttggcgatgtgacagttccattacgaacaccgtggaacggctactttgaaactcttcataatgcacgagttgtcgctgttgataatcctgagcaaatcgatttcgattcattggactggaaaaaactatga

SEQ ID NO: 594 - DNA, 456 bp, Asteriusvirus sp.
  source 1..456: mol_type = genomic DNA
atgaaaattgataatttgattcatgttttaggatctttacataaaatattatcacatctacatgagataaagaaactgggatttaacatctcaaattcaattgacactacatttaaatatcaatcaattactggtgatggttattacataatcgaatatacttatgaaaccgatccagacttctatcctcttacgttgagaatttatccaacaaatccgagaggaattcacgacatatcatcaatttcacttgatccagatggtgaaacgagtattgaatacaataatgattcaaaaccagaattttacattgatgatattaaaatgatgttcaacgatgaatatgtgttccagcaaagtactgtgcatgatgttggaagtactaatggacaattttggaatacatgttattatcatatgattgaaatttgtaaattactaaaaggcgatgattaa

SEQ ID NO: 595 - DNA, 516 bp, Asteriusvirus sp.
  source 1..516: mol_type = genomic DNA
atgccaattccttatgttaaaattattaataatattctcgattcatgggaagatgttattactggtaaaaagcaaccatcaccagtacatgctttatctgggaaacttcaattcagaatgtcaaaccaaactgaaacatttaataatcatgatatttgcattacattaaaaacacctatcagtattgtaattaaaaaaaataaagatgatgaattgacattatctattggtcgtgataaaatcattttaagtaatttgtctgaagaagaattctttcaaagaagtactattatcgatatgaaagatttcacatatgaatcattggttgaactcaatacacgttttaacgatattcaggaacgattgcgaccaattcttcgtatcgaagaagaagcctggattgaaagtattaggaagatgcaagaaatgttgaaagaaaatattaacaatctgggtaaagctacaatggaatttggtaaaacttttaaactgaacttttcaaaggatcgtaaatga

SEQ ID NO: 596 - DNA, 531 bp, Asteriusvirus sp.
  source 1..531: mol_type = genomic DNA
atggactatgccagttatatcacatttactaagagagatattcttttgaacataaacaaataccaaacttatataaaacgtacagaaagtttcaaacggctggctgtaaaatctgaattagaatttaatttgtattatcctaatattggtgatgaggtattttattgctctcattcaaagaatggaactttacttaaatcgggtaaaggaactattgttgatatgaccgcaaatttcagaggtaaacttaatgtaatgtacaaagtacaagattcaagtactgagtgtattcatgaagtgatgcataacatacctgcatatccaaaagattttgttcagctaatatctcgaagggagaaacctatgttttattgtggttatgacaaattaaccaaacaaattattcctaatactatgggaaaatttaaaagtgatgtgaaatctgaacttgaaaagaaatttggcacgtcatgggaaactgaaaacgagtttatcgaaattcgtttaattgaaattactatacttgaataa

SEQ ID NO: 597 - DNA, 216 bp, Asteriusvirus sp.
  source 1..216: mol_type = genomic DNA
gtgtttcgtgacccagtgatcagtcgtcaatatctattagagaatggcaaaagaaatattgactatagacacttaagtgtagtagaatgttgtaaattacagggtgttcctgaagatttctttaaagtgtctagtaagacacaagcatacaaaatgcttgggaatggatggactatgccagttatatcacatttactaagagagatattcttttga

SEQ ID NO: 598 - DNA, 1611 bp, Asteriusvirus sp.
  source 1..1611: mol_type = genomic DNA
atgaaacctatccgagtactatctctttttaatgggatgagtgtgggatacatggcattaaaagatgctggcatccctgttgaaaaatattattcatccgaaattgacaagtacgcaatagctgaatcccaagctaactttcctgatatcacccaattgggtgatgtaactaaatggagagaatgggatattgagtgggataaaatagatttattaatgggtggatttccatgcttcccagcaggaaccatgattatgacagacaaaggtcataaagatataaaagacattcaagttggtgacatggtactgacacatactggtaaatatcatccagttttgagtactggtgttaaaaatgctcccactcgtattattacaggtcaaggtcaccttccaattgaatgtaccgataatcatcccttttattcaagaaaaatgacgtctatgtggaataacaacattagacaatatgaacgtcatttttctgaaccagaatgggtagaggcacatgatttgacatatgaccattttctgtgtaatgttaaatccattgaatctaacaaatcaacgaaagacgaaaaattctggtattttatgggtcgctttatgggtgatgggtggacatataaagtaaaacgcaacaatagaaccaatagttaccaatatagagttttcatctgttgtgcacatgacgaatttaatgaattagtttcatgttttgatggtatgaatatgaaatataattatgttaaagaaaggacttcatataaattttatatatgttcaaaagaactggttgaattttgtgaacaaatgggaaagggtgcttctaacaaacaagtacacccagaactattcacagaatgcataaaaaaccaaaaagcatttcttgatggttactttgacgctgatggacatattgatagtggatgttataaattcactacaacatcaataaactgtgtattgggtattcaacaattgataatgaacgtatatggaaggcattccaatataagctatactgaaccagagaataccaaagttattgaaaatcgagttgttaaccaaaaaccttattatgttttgtcatataaaaaagaccaaccgaaaaaagaggaagctttttatgacaaaaattattcgtgggttaaaggtgtaaaaacaagcactcatactggagaatggaaaactgtatataattttgaagttgctgttgataacacgtacactgcaaataatatagttgttcacaattgtcaagcatggtcagttgctggtaaacagggtggtataaatgacccacgtgggatgttgtttcacacgatggttgatatctaccagcacataaaaagtttaaatcctaacttgaaagttctctttgagaatgttaagatgaaagaagatttcaagcaatacattaatagtgttcttgagatgacaccagtactgataaactcccagcattatacgcctcacttcaggcagagatattactggtacagtactgataagcttttataccacctgcattatccaatgcacctaaacttcaagatattattgaagatggttggtacactgacagaaccgcttcgtactgtatag

SEQ ID NO: 599 - DNA, 252 bp, Asteriusvirus sp.
  source 1..252: mol_type = genomic DNA
atgagtgaacatagtgctgtgcttaaaaagattttaaatgaacttgatggtgagtttaatgtcacagaagaagaatatcagcattggaagaaaggttttgaacaactaaccgagtatgataaagtgttcaatatgattggcgtaattagccagtacttactcggtggaggacgtgcaagtgcttcaattctggcatctgcaatcatctgtacatcacgatggtgtgatgaaaaaagtttggaagatttctaa

SEQ ID NO: 600 - DNA, 90 bp, Asteriusvirus sp.
  source 1..90: mol_type = genomic DNA
gtgaggaaatatatgtctgaaaagccaaaagaaccattagatcgtgatgatgatttttatgacgaacgatatggagatgatgatgagtga

SEQ ID NO: 601 - DNA, 261 bp, Asteriusvirus sp.
  source 1..261: mol_type = genomic DNA
atgactaaagtagttcgtaaacgccacatgatgaacatggatgaatttcgcacatttgacaaatatcgtactatgtttcgtatgctttcacagggccgtccaatcgtcattgtaacagagaattacatgtcacctgagattatgtttggtaattatgaaaaggtcttcatgttgtacgtgaagcgtggattacttacaatcaagacattagctgaagcaactgatgaagatatggatggtgataatacctttaccatgtga

SEQ ID NO: 602 - DNA, 441 bp, Asteriusvirus sp.
  source 1..441: mol_type = genomic DNA
atgctaaatccaagtaaatttctccacttactttcgataacatcaataccggatcttaccagtgaaactaatgaatatcgtgaagctggggtggtgtctatggaactcgatacatttgaccacaaatgctatgtgacatatgacccaccgcgttatggtaaagaacattcttcttttatttttgtattcgtatacacggtatatgataatacaacacttgatgatgtttgtattgacacatacgaaatttgtgataatatcataactgatgacaacaataactcatttgatatgtcactatataacacagaagaatcgttgtttcaacttagtactgttattgatgcaccatcattagaagatataaaacaatttcaagaacatcttgacgcagttcgtgagatgttctataatcattatccagaagtagagttcaattaa

SEQ ID NO: 603 - DNA, 456 bp, Asteriusvirus sp.
  source 1..456: mol_type = genomic DNA
atgaatgttgacgaaataaaaaatcattttgaaattgcaatgtcatgtgaatttgacacacaacgtgttcatgacccgaaagaacatatacgcatttgttgtgaattgtcagatgattgtaatatttttattggaaaaacctatgacatgatcgatctttcatgtatagatccattggaaagaaaaacaaaatatttatatctgtacaacacaacatcagatacgattgcaatacaactaatatcaaccacaacatcccaaagttattataacataactgaggttagtagtttatcgttaaccgaagaaggattctttcaacaatcgcttattcgtgaaattggtgttagttatgatgagttaaatgtattagtagattgtttcgaaaaattgagtacttttgtattatccctttttaatatacagtcgcaaaatccaatggtggtgaaatgctaa

SEQ ID NO: 604 - DNA, 378 bp, Asteriusvirus sp.
  source 1..378: mol_type = genomic DNA
atgactactatatatgatattttgggtgttctgagtaaaaatatagatgatgattttgttattgttcaagatactagaaatacatttcaactaccattaggttcaccagataggttaatttttaatagatactcaaatgaactaacttacatccatgatgggattgcaattgtatcagtttctataaacgactatacaatacgatatgtatatgacttcaacaattattgtacaagaatccacagtattgatatttccgaagaggaactattccaattgtcagtgattgagaaaaatgtaataggaattacagaaattaatattgttaaaaaagcattaaactatacgaatataagaattaatggtgggtgcagatga

SEQ ID NO: 605 - DNA, 405 bp, Asteriusvirus sp.
  source 1..405: mol_type = genomic DNA
atggtaagtttactagatattgacaataccagtttagtgctggtgaaaaaaggtttaattcccaattctacaaaaattgattatgctgttattgaaacaaatatgggaaatatctggtatgattcagaaagtgatattgtgattagctgtgtagacagtgatcgttctgaatgttgtagagtcgggcatgacggacaatttgtttttgaatttcgttattggaaggactcaaaatttcaccaagaactggttgcattgtcaaatgaactgtatacagaagaaactttcttcatggaaagtactattaataatgttggttcagtaacgtatgagcactataaaaaagtatatgcactatccagagaagttatgaaaattatcagaactgctgaaggtaaagaataa

SEQ ID NO: 606 - DNA, 411 bp, Asteriusvirus sp.
  source 1..411: mol_type = genomic DNA
atgagtttagatttacacaatgaaataaaatattttttagatttgaacatatcagaattgaaccaccacgtcaatcatatgactagtactgtatggtggtctaatgaacaagacgacccaattatccaactaagtgatgaatcgtcaattatgcgattttataagattaattataaaaagaacatcaagatcacatatgtaccatacaaaaacatactactagtcgaaacacttaatccaagttctttattaaaaatcaccgatttagatacattacaaacaagtgaatctttattccaacgttcattagttgatgatcttggtggtattacttttgaagatatattacaattcaagaagatgtatagtgaattgttagagattaaaaacactttagtaatgaggaattga

SEQ ID NO: 607 - DNA, 546 bp, Asteriusvirus sp.
  source 1..546: mol_type = genomic DNA
atggttaacatatcatgttactttcctcccttacataataatgatgcgttattatattttcattttgttcttattccccttttggtacaaaatcattttagtactgccccgatcttcggggcatttttattatctaaaattcgagtatatatgaaaaataatattggaacttcaataattaaaccactttcttattaccttgaaaaatttagaagcacaaatggtaaaaaatttaataatatatttcagttctctcacaaagaatatattacaattgatcatttttcaaagaaactaatgtatgtaaatgataatattaatattattagattatctttcgatattgagttagataaattaacatttactgaatacattaataaaaaaacttcttttttatgtcaatacaataggaaagtatatagtaatatttctatgtatcttaatgatgaatatcactttcaacaatctacaatagaagaagtattattcagtactgaagaattaaaagaactatattactggtataattattttacatcttga

SEQ ID NO: 608 - DNA, 552 bp, Asteriusvirus sp.
  source 1..552: mol_type = genomic DNA
atgatagaccaaattaaaatccttacaaagcaaatcactgattttctttctgataaagatggatttaatacagaagtaaaaatgcacggtgttagtgttgatgtaattgcaccaaatggtaatgtaacaagttacgacatgtatgaattacttctttatactctagcagtacgtaaactaggtagtgatattgaactcaacatcaatactgatgaaagtggaaataaaatttttgcaatcaacaccagtgctaaattcgatatcagtactgaaattaaaaaaataaatgaaagttttattggctttaagcatgaatcaattcaaagtgtttttattggaaagcaaacttctaatagtgaatgcccatattgtgtaatgactttatataaagatggaaactggatgcgacaagatttagtatttgctgaacttctgtatgcatttacacatgaacttaaaatcgaattggacgatagtgtttattgctttaagaaaattcgaaatataactaaagatatacaaacccaacttaaagaattaaatgataaataa

SEQ ID NO: 609 - DNA, 429 bp, Asteriusvirus sp.
  source 1..429: mol_type = genomic DNA
atgaatatcgaacaaactatccgtgaacattctttcttcgctccagaaactggtcgtgttattgagagcgtcaaaatcgaagaactaatggtcaatgttaaatacaaagaaccaaatgatgagattagcagtactttttgtgctctacgtgcaccattccgtaatgaaaaagctaagaaaccagcatatgttcttgccattgcactgggttgtgttgtaaaacttgcagttgatgaaaatcttctgaatattaaagttgcaccaagcaatgacgatgaaaacattgatttgaactttgatggttctcttgatgaagatgtatttttccaacagtcacttgtttacgacttccgtacagtgacacattctcacatcaagttcattaatgaaatggttgagattgttgctgaatacgaagaatctctctaa

SEQ ID NO: 610 - DNA, 129 bp, Asteriusvirus sp.
  source 1..129: mol_type = genomic DNA
atgttgatttgtacaatatgtcagtcaaagaaatcagcaactttcatcgttgatgatagatttggtgatttgaaacagtttaaagcaaaccgcaatcttcgtatttttagcaatctaaataaggaataa

SEQ ID NO: 611 - DNA, 216 bp, Asteriusvirus sp.
  source 1..216: mol_type = genomic DNA
atgtctgataagtatgcgtttaaatcctttttaaaatggtataaccgtgtatgggttgcagtaaagtatgtttttggtgtaaacgactatcaatatgtagaagcaacaattgatgttgacattctaaaagaagttgtgttacaattagaagatactagaactgatgaggttaaaaaagaacaaagagaaaaacgtactgatgtgaaggttttatga

SEQ ID NO: 612 - DNA, 153 bp, Asteriusvirus sp.
  source 1..153: mol_type = genomic DNA
atgagtgaagatagtaaagagtatattttacgttgttcttgtggcgataaaatggagcattgcgttcacattgcacaatttgacttgacagaggaatatggagatgataaacttggtcaatgtctgataagtatgcgtttaaatcctttttaa

SEQ ID NO: 613 - DNA, 423 bp, Asteriusvirus sp.
  source 1..423: mol_type = genomic DNA
atgaagttctttaaaattcgaattggtgtaagttctggtttatctcattgggtattttatgatttacctgatagttatactattgatgatgtaattgatttatataccgaagatcaacaatgggtgttagataccgaaacatatagaattgattgtcaagagattagtgaagaagattacaagcacggaaagcaagccatgaagtattttgaaacaaatatcaaaatgctgtctgaaaacgtatttcctgtaaaagaatgggcaattttacttgctaatcctaaaaaacctgttagaattggttatccaaattttcatatggtgtatcgtatgaatgataagcgagagcttaactatcaatacgattacgattcatctaagtttggagttcttaaacaatttttaaaggcttatccagtatga

SEQ ID NO: 614 - DNA, 162 bp, Asteriusvirus sp.
  source 1..162: mol_type = genomic DNA
atgaaaaaaacttggaaaatattcacaatacctgctataatgttgttattggcacttttcacaccgcagagtcatgtattgtctcttaatattgtggaaataattcttcttgtaattcactgtgtcgtgtgttataattatgtaaaaggtgataaagaatga

SEQ ID NO: 615 - DNA, 231 bp, Asteriusvirus sp.
  source 1..231: mol_type = genomic DNA
atgaacgacaaaatctttgatacatatgacatcgatactttactaacaccatctgataacagtactgttaaaatggacatgtactggattgttgttgataaaaaagtatttagacataaaattactaaagtttggcaatgtaataaaaacaaatctattgttgaaggattggcacaatgcattcctaatgcagaggttttatttttaccatacgcatatacaaaggaataa

SEQ ID NO: 616 - DNA, 279 bp, Asteriusvirus sp.
  source 1..279: mol_type = genomic DNA
atgggtaaatgttgggtatgcttcaaggtgtttgatgaagaatatgaaataatattagatgtattgccacaacagtacatggtatgtaatgaaaaatacaaattggacacctacccgacccccaagtacatgggaatatgtcctttgtgtgatgcaaatggcgtgtccaatagtgagatttcattcactaaccaagccacaactaactgtgtatctgggtatataagagagaatcgagaatattttattaggagattatatgaacgacaaaatctttga

SEQ ID NO: 617 - DNA, 492 bp, Asteriusvirus sp.
  source 1..492: mol_type = genomic DNA
atgtttgaattcccagaagagtcatttaacttcattgaccctactgatgatggataccgacatattaacatttatagtaaagccagaacgaagttaggtagagatctatctaacttttcttcgcacagcttcaaacttgaaccatatggatggttcccatcagttgaaacattttacttttggtttttaactggtcaaaaacatgatgaccttagaaaagtatctggggcagcagcaaaggccgccgctaacaaatatatgcatgatcgaattgaaatgacagatgattgtatctcaataatccaagatgctatttgtgctaagataattcaaaatccagagttagctgaaagattaagaaaaagcaagttgcctttttaccattactatgtatatggtggtaaagttgtagatgtatccgacgaacatgattggtttgttaaaacattcgaatatataagaactgtgttaaaggaaaactatgatgggtaa

SEQ ID NO: 618 - DNA, 354 bp, Asteriusvirus sp.
  source 1..354: mol_type = genomic DNA
atgctaatttatttgagtgttattgtaatttcgttactggtatcattcgctgttcttaaaattgttgctatttgtagaagtaagattgatagttctgaaactagatcagtacttgacttgattatggatcatcctaaaatctgtggtattattgtattattcgttgtactgattaatacatatattgtcagggaacatttatataatatgtatgattgtagtgtacgttctatttcacaaggtgttgaaacagactatagttggtactatgagaaatgtcgatttaaaaaccagcatggtatttgggttgattttgataaactacgtggaactccttcaggagaagaagaataa

SEQ ID NO: 619 - DNA, 573 bp, Asteriusvirus sp.
  source 1..573: mol_type = genomic DNA
atgactagatttcatcaagatgatttgccatttatacaagaactagaagaactggtgataagtattatggatgaaattagtacttgggatataacagtttttcgaaatgtatatgataaagtggtgaattttaaaaatgttaatattgaagtaaaacataataatttttacttaacaaaacaattcattctaactcgaccaggatcaaagccagttaaacgtaatttatcattcggacacctgattggtgcagaaaatgtacatgatgaatgggttgattcaatctattcgtatacaaaagaacttattcctgatattgagaaaaaatattatcttagtatcacattagatgaaaatggtaatcttaatgcatattcaataaattcttcttcaaatgttccattacattcagtgacgattggtgataaaaaaatgctaataaattctgaaacatggtataatagagaaaatttcgcagcagaatcatttcagtactcagtatctgaaccaaagtcaccttttgatttagtgtttgttaataatattattttacgttttggtgtaggagtgtaa

SEQ ID NO: 620 - DNA, 597 bp, Asteriusvirus sp.
  source 1..597: mol_type = genomic DNA
atggggtgtactatgtttttaaaaaatacttatgaattaattaaaatgcttcaaaatatgaattccggcggcttatttccctattactctgaggatgaaactcatcgtttagtccttaaattggatgaaactggacgtattatatcactaagaacaacagtccccagtgtagaaccagtaattaccaaatcaactcaaaattcaggaactgctgttaaaacaccacaaacatacaactctaattaccaacaaccacaaatgtacacgattagcactccacctattaaacgagttgcttgtattgtgaatataaaagtatctaaggactatcgcgacttaatatcagttgaatggtcagaactaacatcatcattagcaacaaatggatttgtagtaacaaatacaggtctagcacaaaatgtgaaagaaggacaacagatcatgagtgcattgtatcttagtaatggttgtgttatcatcaatggtaagttgtatagcgataccgaccccactgcattcactgaagatttgattggtgataaagaatacagcattcttgaaattatgaatttgaaaaaggtatatgaaaaaccatga

SEQ ID NO: 621 - DNA, 555 bp, Asteriusvirus sp.
  source 1..555: mol_type = genomic DNA
atgaatggtaaactccttgcgttaattggtattttggtagttatcgtactaatggtgtttggttctattagtatgtatgttggtgcacatgatcgtgcagttgagtttgaaggaaacattaaaaagtattatgatgcatcagaaagtcaacttagcaattatactcttactattcaagataaggttcaagtagccgataagtataaagatgcgttgaaagaaacgattgaatcatactttaaagggcgtgaaggtgttgaccagaagtttgtaatgtcacagattcaacaacaggttccaaatcttgatcctaaaatttatcaggaattgatggtgacaattgaaacaggacgtacaaagttcaacaatcttcagaaaatgaaaattgaccagtgtactgattatgctaagttccgcaaaggcttctggaattccaaaattcttgattcgaatacgtttccaagtgaaaatattgaacacctttgtacagtagtatctgatacacgtaccaagaaagcaatggatactggtattcaagaatcaattaaactataa

SEQ ID NO: 622 - DNA, 1095 bp, Asteriusvirus sp.
  source 1..1095: mol_type = genomic DNA
atgaatttcattattctgttaatacctgctcttatcgttgtattcgttatgaaatacatgtacgataagcatatcagtactaaagaactattgattcatattggttgttgtctggttggtgcggctcttgttcttggtatttcatacgcaatcaactatagccagctttatgatgttgagattctgaatggtcaagtaacttcaaaatacagccacaaagaatattgcacacaatctagttcatgtaagcactatacatggcatgagaagtgccatacgcgatatgatagtaaaggtaaatcacatcgtgagtgtgaatcatataaggtttttgattactcatatgaagttgattggtatgtgaaaagtacagtaggtgagtttgagattgaacgtgtgaaccgtcaaggtacaatgacaccaccacgttggcagcaagttattattggtgactatgccgcagcagagagttcatatatcaactatctatttgctgataagaactcattgtttagtcctgaagaactacacaacatgtatgatgaaaagtatcttagtactattccagaatacccaagtgtagttgattattacaaaacacatcacgtaattaacactacaaattacaacgttgatggttacgatgaataccttcgtaatgagctaaaaacgatgggtgcacgtaagcaggtaaacatccaagtactagtatatgattacaaagatgtggattttgttgatgctacccttgcatcgtggcgtggtggtaagaagaatgatgttattatgttctttggtattgacaatgatggtaacgttgttaaattcaacagtacatcatttgcacaaggaatgaagaatgaagagttacatgcaaagatgcgtattgatgcattaaatgaaaaattaactcttgacttactagttaaagaagtacataatattgacaaacattttgagagactctctaataaagagtttgagtacttgtcagttaaaatggaacctagaaaagatgttcttatcggtgcttccattgtgttgttgattctgtctatttttattggcctttatatgagggataacgatttatga

SEQ ID NO: 623 - DNA, 690 bp, Asteriusvirus sp.
  source 1..690: mol_type = genomic DNA
atgaaacgtcgtcatattagtgttgatattgaagctcttggaacacctgaactttccggttatgatattattatcccaaattacgcagcagtagtagttccaagtaaacctgaaaatgacattcgtcagttcttatatattaaattaccataccaggatcaagttgctactggtttaaaatcagacgcaggtgcaatggatttttggatgaatacatgtcagaaagaataccctaatgcatatgctgaagttgccagtactatgaaactcaaagcacctgaactgtatggaccgaatggtcaatcacgacgattttttgcatacagtagtattgttgatttctggaaagaattacgttacaatgattatggtgaagaagtttctcattcagtctggggcaacggatgtaacttcgattgtagtattttacaagcaaaccatttaaaactaatgaacgctggtgagttgtggaagtatgatgcacctgaaaatgcacgcacattgaaacgtttattgaatgaagaagctcgtattgaaatggatgaaatcgtttcggtacagttggataaatttatcacatatgcaaatacgtgtgggattaatgggttggagttacatcatccactatttgatgcagcacgtgaagcaatccagatttcattctgtctaaacaagcttaaaatggattaa

SEQ ID NO: 624 - DNA, 1143 bp, Asteriusvirus sp.
  source 1..1143: mol_type = genomic DNA
atgtccgagaaagaaatcaatcctaaaaaagcatccaccgcagctaaatcagcaaaacgtactactaaaactgcgactaaaggtcatacaattgatgcaagtgatatttttaaccaaactacaaaatcactaccagtactgaaagatgttaagggaaatactatgtctctaacagttcaaaacatcaatactgttggtacaactgctggtgctgctgttgggcgtttggctgatgaaattatgtctaaagttaatgtaacggatgacaataccgagtttggtaaatcaatcaccacaattcttacgttgactcgtgcagttgatattgacagtcttcaagaagataaatcaattgttggtcgtattaagaaattctttgttaatgctcaacagaaagtaggtgatcagtacaaaaacagtaaagagcaaattgacgaaattatgaaaactcttcaaactggtattaatcgccagcacggagaatgtgaatggcttgataaagcatataatgaaaacaaagaatatttgtttgaattgcgtgatacattagttggtttagaagaagtgactaaaacacaagatgcattattagtagaaatgcaagcagacaaaaatgtagactcttttgctattcaagagcaaaagatgatttgtgaagcactttctaaacaagaagataagattcgtcgtcttatcatgatgtgcgaactaagtggtccacgcttgatgagtatgaaaaaagtaaacttgaacactgtttctaagtttgaagatttaaaatccgttgttattccagcatggaagtctcaattggctgaacagttgatttccgagcgtcaacgtaaggataatgaactaggcaatctaattgataatgagacaaaccgtcttttggaaactaactctaaaatggttgcagcaaatatgttggatgcagcaaaggcaaacaaccgtggtattgtggatattaaaaccttgcgtaatgtacataaaacgatgattgacagtattgaagcagttattgaagaagagaaaaaggtaaattggaacgtgaacgtgctaaacaggaaattgcacaactttcctatgaactggaagacactcttcgtgaaattgccgaaaaagctaacaagtaatagttga

SEQ ID NO: 625 - DNA, 102 bp, Asteriusvirus sp.
  source 1..102: mol_type = genomic DNA
atggtaacaaagagtaaaaaaatacttgactatcatacgtgctgcccgtataatgtttatcacagagcagcacatcatattaaattaaacgaggaatactaa

SEQ ID NO: 626 - DNA, 1128 bp, Asteriusvirus sp.
  source 1..1128: mol_type = genomic DNA
atgaaaggtaaatattttttcattgaaaatggcaaagaagttgagattcaagaatttaactataattatgtactgaactctttattgaaacaatatgaccgttcatcaaacaaaaaatacatttataatgtaattgttcgccgcacctatgactcattgggtaatccgttatttgatgtaaaaactctgtcattagatgaaatctattttgataataaacgtctgaaagttcttgatttaatgaaggataaaattcattttagtaatattagaattgatcctaacatgccagtaccgccattagagcgtgaatatcgtgaatggaaagaaggtcgtgccaaaccacgtttagacttggtacaaacatcaccagatgtacctgcacctattgttcttaagaaaaaacctatcaacccagacgatagcagaattgatgacattgaaagatgggttgaattccctagtactattgaaaagaattcagtaaaagtactagactggtttgtaaacttaccagtttgtgcacaagaaattggaactaagattcaacaaatttcagaacgtcaattggatcttaactcagcattacaacagcatagtgattatattagaatgcttatgaataaccttactgttgcgttggaaacgttgttcccattgaagccgacctttacgcagaaattgtttggtaaaactgatatcaaagtgcaaccatcagatttgccaaaagtgatgaaagcactaaatgaagcagttaagtacgatactaataagtttagtggtcttagtaccatgttttcagaacttagaaacgaagttcatgaaatcaaaaatgaacttgaatatgggaagttgggatgtgaatacgcactacgttgtgtggatgatgcgtttgaatatgaattaacattagaacgtattatgaaaatgggaatcaccacatccatgactgaaacgagcattattgcaacaagtaagcaatatcaagttgatatgaatcgtatggtagatatccaaactattactattcctttgattatcaatcgtttacaatcacagacaggtaaagctgtagatgagagtactgtagagattattcgtaatctggcatatggtaacaaagagtaa

SEQ ID NO: 627 - DNA, 819 bp, Asteriusvirus sp.
  source 1..819: mol_type = genomic DNA
atgagaattttaaatatgcttaaatctcttcacgaaacaaccaaattacatcaggatgaaaagtatcgtcgcagccttactaaagatttagcatgtcgtatgtatatgcgtagatttgaaatttcaagaattggtaaaggctgggatgatgtaaatcgtgaagacattgatccagatgcaatttttaaagcatacatggctagaaaagttttcataaatgaaaaaactttttatattgatagtgatagagaattagaaaataaatttacaaaaggtttatggaagatatggtgtgttgaagtattcggtgaagtattacctgagccacctgttccagaaacttataaagatttaaaaagtatttttgataatgaacatatacattcaaatttctcattatatgatactgtgtcagaagctgtattttatggtgagttacatggtcataacaaatactttgatagtatggttagttttgatttgttttgtcacttgcctggtgtatcaagttggacatgtgaccaacacagagcaagtaagattgataagcgaaaattctcggcccaaagatttatgcaagttgctatgagtatgtataaacttgattatcttggttgtccagaaccatataaacatttttggaaagaaagagcacaaaaatgtttaaactattgtataatccgtttaatggacacatacattcttaagtttagaaatgcaactgtatacgacatgcctgaaccaccaaagaatgaaaaatatccacctgtcaagacatttgtatggtacaaggataaaagtaacaaaaggatgcactaa

SEQ ID NO: 628 - DNA, 681 bp, Asteriusvirus sp.
  source 1..681: mol_type = genomic DNA
atgaaaaagaaattaaatgaacaaggcttacgtccgcaagttctcaaagatttgattcatcctataattagtgttgatgaatatactcctaaaattgaagatagtaatattgttattatgtttcaggttcttaacaattttgatgcagcatatgatttatcttcttttattgaaaaatcacctattgatgtagttgatacagaagcagcagaaacaccaaatttagatggtcgatatcaagtttatgtggaaatggaacgaaatgctgaattccctgaaaaacttttacgtttaattaaaactattgaaaatatttgtccagacccaggttggaaaatacaactatatggtgttaatgacccaatcgatgttgattttgaagaaatacagcagagaattgatttgggcattcctagttcaattagtgagttccttgattatgctggtgtttcagtaatcaaagaaggaaacatgttgacattaaaaacagcatatggtaaattacactacagtactggaagcggttttgtttcagaaacatatgtgaaaaagttattaaagaatgatacacaattagacacttcgcgtcttagttccatactaggggaaagctatacagtactacgaagtggtgatcaatatgtaattggaagaaacgggaaatatttggtgttgcgatga

SEQ ID NO: 629 - DNA, 564 bp, Asteriusvirus sp.
  source 1..564: mol_type = genomic DNA
atggacgatttagattatacagataatgctattcagcagttgtatgataacagtggtatgttagatatacttcttgctgtagaaaaatatttcgatgataatgatttgtatgcgtataaaggaattattgagggtgagttggtagagggaccaattgtaagtaagtattggtgtactgtaacatttaaatactatcgtgaaaacttccctgatcctacagcattctctattttggagaagcatggaactaaagtatatgttaaagctgattatgaaataactcctatcaaagaacctaatcgacaagctgatatgaaaagtgttgcgacacaatcaggatcggtacgtataccaaaaaatgaaagaatcccagtactattggttagagtgcagattccacgaaacttaattaatccagaaagttttgatgaatataaactaatggcagcagaattcaatagtaatccaatgaattcaccagaaaattttgaagaacctgtaactggtgatgatgtagatttggatgtggaagtaacggatgagacacaagaaggtggaatgtaa

SEQ ID NO: 630 - DNA, 627 bp, Asteriusvirus sp.
  source 1..627: mol_type = genomic DNA
atgaaaccacgttgtatagtttttgattgtgatgaagttctattggaccatatgggtatgctttctgagttcgtaaaacaaacttataatatcacaccatcaacaccatacccattagaatatgatttatccgattggttgggtgtcccccaacaagaagttaaaaaaattcttgaacaattcaaccaacaatcatatttgtttgggttgttaaaaccagtcgaacctaatacagttgatattgtacaagagctacgtgatcgttttcataaagaaaaatttgtagtactaacaaaatgtggcaaaaaaggttatggagaagttttacgtaatgtaaacctaatgcgtgaatttggtgaaaactgttttgatgagattattattatcgaaatgaacgaatcaaagaaacaagcactagaggatttacagtctagatatgatgtaaaacttatgattgatgattatatcaataatattgaaactgcaatgggacttggtattccgtcagttatgatgggatgttctcataattcaatgtataagaacactggtaattttgaatacattgagaattggacagatcttagattgaaaatttattcagtactaggtaaatattacaaataa

SEQ ID NO: 631 - DNA, 726 bp, Asteriusvirus sp.
  source 1..726: mol_type = genomic DNA
atgtcggatgagggtattgatgcagttcgtgataaaatcgatgccgcagcaaagctatcatgttttggtaggtatcgtatctttgttcttgaagaaatggagcagatgaaccataaagcacaaggtagtttgaaacgtgtaatggaagactaccatgaaaacgctcgctttattttaacaagtaacgaaccacataaaattcaaaaacctatcatttctcgtgttcaagttattacaatcgaaaagcatgatatggaacaattcatgactcgaatttataatattcttctagcagaaggtgttgatttgagtagtgatgatagtgttgaacaagttcaaaagtatatcaatgcttcctatcctgatttccgtaaaacactaaacgtattgcaaagttcagttgttgatggtaagctagtaaaacttgaagatagtattgaaaattcagcagggtatcgtactgcaattgttgaagcattaaaggcaggaaacattcgccaaatgcgtgaacaaattgtacaaaatatccctgatgatgagatggatgcattcttttcttatctgtatcgtaatgctgaaatgttcagtactgatgaaattactcttatgaaaatcaaggttaagattcgtgatgctgttgtaaaacaagcaactgtatctgaccgtgaaatgaatctcagtgcacttctgtgcgagattgacctaatttgttcggggaacatgtaa

SEQ ID NO: 632 - DNA, 216 bp, Asteriusvirus sp.
  source 1..216: mol_type = genomic DNA
atgaccacactatggactgaaaaatatcgcccacaatcaatggaagattatgtatcaaaaaatgatgcactacgccagaaaatggaagaatggattaaaactggtgacattccacatattgggtttttggcccagcaggaactggtaaaacatctgcgatcaaagtactcattaatggattggtacagaatggacaccttgacccaagtgatgtga

SEQ ID NO: 633 - DNA, 270 bp, Asteriusvirus sp.
  source 1..270: mol_type = genomic DNA
atgataacggatgatggaaaatttagtttcaaagatgtaacattagtatcaaaaaacggaagattcatgtttgaagatagaaaaaatacaaaatatgtatatgaagtttcacatgatatgtttaaagttttattagttgcatcggcccaagctgaaagtactgggattaaaaataaggcaaattcttttaattttttattaaatcaattggaaatgacagaagaacttttcacggctttattatataattcagccgattggattctataa

SEQ ID NO: 634 - DNA, 327 bp, Asteriusvirus sp.
  source 1..327: mol_type = genomic DNA
atgtctaataaagtaatgactgcatgtaaaggtaaagtactagtcactgaactggaacatggtgaacgcaaaacagcaggtggaatcgttttaacaaacgatgacggtaaaattagaggtattcgttctcgctgggctaaagtatattcagtaggcgaagacattactgatattaaagaaggtcaatggattttaattgatcatggtcgttggtcaagaacgattgaggttgatggtattgaactaaacctagttgattaccctgccgctgttagtttagtatctgatgaagacccacgcactaaaatgctaacctttggacgttga

SEQ ID NO: 635 - DNA, 345 bp, Asteriusvirus sp.
  source 1..345: mol_type = genomic DNA
atgtctaaacatacaacttatcgtggtacaacaattgacatggatatgctcaagtaccaaaatcaacatcaggtagcattgggtaatgctaatctaaacgcacgtggtgataaaattggttcaggtggaacaattatcaaaactcgtgaagagttgatacaagaaaaagaacgagaaatgcaaattcctgattatatccctgaacaccaacttcatagtactgaacatagttctgaggaagtatgggatgatgaaagttttgaagttaagcccgaagcacaagaagctgaggtttctgaagagaagaaagccccacgtcgagcaaaaactaaagatcaggagtaa

SEQ ID NO: 636 - DNA, 543 bp, Asteriusvirus sp.
  source 1..543: mol_type = genomic DNA
atgaagaggcccagaaaaagaaaaatgaaagtacaaggaaacagatttataagtcccaatggtgatgtaaaatgtaatcttaacgcagtagtttatgcaatcaattgcggtgcggatatccagtacttacaattgcaggaaattgatgaacctgaaaggttgaaattcaatgataactgtaaaaaatttggcttagaacaacgtatgctggattatactatcgagcatgataaaaatcatgaactttggcgttatgatccagtatacgacaatataaatctacgtgactttttcttacaaaaatgtacatcagatgaagcacgaaagcgtgttgagtatgaactagatttatatgaatattataatatgacaaagctattaagatgtatgatatggcttgttgattatatggaagaaaatgagatcttttggggtctagggcgtggaagctcggttgcatcatactgtttgtttttgattggtctacacatggtagattcattgaaatacgaactcgatgttaatgaatttttgaaatggtag

SEQ ID NO: 637 - DNA, 312 bp, Asteriusvirus sp.
  source 1..312: mol_type = genomic DNA
atgtttaatccgttttttgacccgtctgggatgacggagaaagaactacagttgaaaattaatgaacagtcaatgcgtataacttcagcccgtgccgctggtatgagtgatatgattattggtaatatgcaaactgtgttaaatcaatgttatgctgaactagaacttcgtcaaggacaaaaagaaaaatctgtttatgatgaagaagactcatgtatcttcgacatggattcttatctaactgacaatgaagaggcccagaaaaagaaaaatgaaagtacaaggaaacagatttataagtcccaatggtga

SEQ ID NO: 638 - DNA, 684 bp, Asteriusvirus sp.
  source 1..684: mol_type = genomic DNA
atgttattgaaagaaaactttctaagtcaaacgtacccatatactaatctttcggatatcaaaaaagtattacgaaatagtatcattaatccaaatggctctactataccaaatggaaaatttaaaatggtaatgggtaattataaattgatatcagcacttgacaatcaaggcaatttgcaatatgatttattatatagagaagttttacctgaaggttctttagtatctgtatccaaaaatcctcgtatgtatactcaaatagataatggtcagcttggtgaactgtttggtctacgtcaaaatatctttcaagctattggtgaagacacaacaaacttggtaaaagatccaactgatttacaaaatcgtggtctatacgttgatgctataccaagtatcagcgatgaaatgcttgataccgttccaagatttatgaatcacccatacattgaagatggtatacagaaaaaattcatgcctattatcccagtcgcattttgtcagccaggtaaaggtgaagcatttttcaacactttacttcagaataatgaacatggtacaatggtaggtctagagtttgaaatcacatctgtcgaatttgggtacttttcacatgaatcagtaaattatgtaccagatacatttgtgattacattgcaaaacaataacataggaggttaa

SEQ ID NO: 639 - DNA, 1719 bp, Asteriusvirus sp.
  source 1..1719: mol_type = genomic DNA
atgacaacttttaccccacgttgggatataaaagccgatgctcgatatatacaagaaggacaagacattcttgtgcgtttgagtatcaataaagaaagcacaacggatgatagctatgtattaaacgaagatgaatacttagagatgattcttaatatacaatgcttggatagttcaggtgctgtatttgatccagaaccacattatactttttatgttggtaatgacgaaaatagttttattcctatttcagatggaacaactggtaataaactagtaaatggtaagcataagtgtaagattagcaaaacagaatttaacttatcatcaagtactaatactgaagatgtttattttataaaaattcattgtaaaaatgacggaacatataataatactgaaattataaatttttatttacaagcagtaaatgttatgtattttgggaatatttcaccaagtggagttttaggattaacagatacttcaataacatatgatagtcaggaagtttgggttacacctggagttgagattggtgatgacaaaaaactttattgtattggtgatgttgagtatggttcaaacagtacattgtttgttcaagggtttgggagaagaagaccttttatactcggtactgacatgactaccgatattacccctcgtgtattctttcctgcatatcgtttgattgacatggatatatctgaagttccagataaacatattactaatgattatgccgtatttaaaccagcacaaccaacatggcctatttctggcataaacaaagaagtaaaagttaatattcaaaatagaaatggtaatttaattgattcaggtatggtttttaaccctaatggacaattactacaaacatttttatatgattcagatgcgtgtgatgcatatttcaaagttgaaattgttgatatattaagtacatacacagaagaaagcgaaaggtttgctatcaatcaaagatataaggcatatcaaatgtgggtttgtcctgaagatattgacactatatattctatagctgacaaaccactaccgaatcatttatatcaattaaaagataacgttgtatatccctatgtgattagtggtgagtacgacaatgggtcaattaaaccagtttatgatagtagtgattggattgatttgggatattatgactctactcttggtgataatatcattggtatgcagaaaatgttcagggttttgattaacgctgaagaaggtaataatataaactttgttactgatagtgatttgggaactatacatgttggtgaatattttggagacagtacctatcctagaatagaaactgatagttcaaaacaggtttcgtatgttttggatggtggtgatgatattaggaagtatggaatagatttgacacctgacggatatcttgttggaactgcatatgccaaaagtattgactttagtgaaaacgatgacattaaactatcgttttatgttaaagcatttagtactgaaggtggcgaagcaaggaaaatatttaaccttaagattgtaagagggttcggtcagaattatttgagtgcacatgtactaccgtctgttgcatttgagcgagagtggtttaaatgtatcagtacttcatcatttactaatcaacttttttccgtcaatctgataataggtatggtcttcagaaagttcctaggatgttattga

SEQ ID NO: 640 - DNA, 1413 bp, Asteriusvirus sp.
  source 1..1413: mol_type = genomic DNA
atggctaaaagtaaaaaaacagaaaatcaaaatatcgataaccaaacaataactctactagattataacagttctgattatgtgaataccacatcactagaatattcaatgtatacactagaccgtgctattcctggaattgatggactaaagagttcacaacgaaaagcaatttttacactatctaaaattagtggagaaattaaaactgtatcatgtgcaggtaaaatgattagtgatggtatctatcttcatggtgatacctcggcatcaggaacgcttcagaacctagcatctcctgttgcaaacaactatcctcttattggcaagcgtggtggatttggtacacaagtaaacagtactcccgcatctgctcgttatacttatgtcaaaaagaataaaagtactgaaatgttagttttgcgtgatagtgatattattccaatgaaagaaaactatgatggtacaacatatgaaccagtacacttcttgcctattatcccattgtcattatttggtaatgacagtatgtctgttgggtataaaagtacaattctaccacataaaattgaagatattattgataactgtattcgtgctattgataaaaaaccactaaaagaaatgaccccatattatgtttcatgtggtgcaagtgatgttgtgactaagcttgatgaaaataagtatgaattctatggtaaagctgaggttattgatgcaagcacagttaaagtaacaggattaccacctaattacagtattgagaaattcattgaaaaactaatcaaaatgagtgatgatggtgagattcgtgattatgacaatgatagtactgacgtgattgatattactattaaacttccacgtggtacgtcagctaaatggacagagatggatgttattgagtattttggtattaataaaaaaatgactcaacatttaactgttcttggtgaaaatggtaaagtaaaagtttacgatacaacaatggatttgattaaagacttcgttgattttcgtttcaagtattacatcaagcgttatgaaaagaaacttgatgattgtgcggctgaggttcgatacaaaattctaatcaaggaatgctttgataatgatatgattgctaaggtgaaagggtttgcaaaccgtgcagaaatggtggaatttgttaaatcattaaatgcagaaattgaagcaactgacgagaatattcaaagcattgtaaacttcccatcatatcgctggacacaagataattatcaatcagtactacaagatattcaagataatcttgatttgatggataagtataatgaactattatctaatcatgacctaatttgggacatttataaatctgaacttaaagaactaagaaagattgattttactcctaaatcagacaattga

SEQ ID NO: 641 - DNA, 930 bp, Asteriusvirus sp.
  source 1..930: mol_type = genomic DNA
atgaaacccaaccgttctgatattgaagaaggattgttgatttacaacgtgacgacaatgaaagctccatctttcaactcacaaattaaatctaaactaactaatgaaaatgtcattcgtcctattcagcaagcgatgagttctgaatggttcgacgatttagttaagaaaaacaaagaatgggttgatgaaatctttgaacgttgtgcagcacgaactaacaagaaagatgcagaagaagatcgtcgccttgcaaaaaaactactgaaaggtaaagtagcaaaactactagacagtactggtacagatcgttcacagtgtattctattgattgcagaaggtgactctgctatttccaacatggcaagtgctcgtattccaagcattcatggtattctaccattacgtggtaaaattatgaacgttagtggttctgagaaaacaaaagaactaatggattcgatggcattgcatgatataatggctagtatcaacttagttccaggtgttaaagctgaacgtgcagatctcaactacggtaagctttatatttgtgcagatgaagatgaggacgggaagaacattggtgcactagtgtgtaacttcttattcaaattctggcctgagttgtttcaagatcctgaaaatccatttgtgtatattttcaaaaccccgtttatcattcttgagaaaggtaaagaaacacaatacttctatggtcataacgtacatgaatataatccagatgattggaaaggttggaaagcaacccgtgcaaaaggattgggtacgttggaaaaagcaaacttccgtgatgcattcactaatagtgttgcagtagcgatcactgatgacggacgacttggtgaaactcttgatttgattttcaacaagaagcgtgctgatgatcgcaagaactggatggaataa

SEQ ID NO: 642 - DNA, 1038 bp, Asteriusvirus sp.
  source 1..1038: mol_type = genomic DNA
atggctaagaaagaaagtgctgttctacaggaacatgatgttcaacgacttaacgattatcaacatgctcgtttacgtaccgagatgtatcttggttcacgttcagttcatgaaagtcaagtactaatatttggtgaatctggatatgaagttaagaacgtagaatgggttcctgcaattcttactgctacacgtgaaattattgataacagcttagatgaatttaaaaaagcgggaaccaaagaacctgttttaaaagttgatttcaatgaagaagaattatcatttgaaattagtgataatggacgtggtattccaattgattatgtacctgagtatcagaaaaacctttgtactatggtaatgactgaaactaaaacaggtcgtaactttgatgattctaagcgtgacgaaacgattggtcagaatggtctgggtggttcagttgcgatgattgtgagttctaaggctgaactagaaattcatcgtcagggccgtccttataaaacacaaagtagtaatgatggttatgatggtttttataagttcaatcagaagtttgaagaagggacaattatgtttccagaacttcatgtacacgaacctactattcgtaaagtacaaactgataaaacaggaaccactattcgtttcacattgagtaaagaagttttcccaaatagaaaactacctacagaattactttatagtattctgaaagaaatggcagcagccaacccaacttacaaaatattcttgaatggtaaacgtattattattaaaggtaatactgaaaaggcattattcaatgcaccaaaactaatgcagttgaatgttaaagatgactcattcaacttcaacagtacgttttatatcgtaccaaatgccgtatccaatatgaatactaatttccatatgcatggtctagtgaataacgcacctgcttttgatggtggtacacatttggatacatttaaaaagttcttctcactaggagttagtactgcattagaaagagaagcaaaaaacgtcgcatga

SEQ ID NO: 643 - DNA, 792 bp, Asteriusvirus sp.
  source 1..792: mol_type = genomic DNA
atgccaagtaaaagtaaaagtcaggcgaagtttttcgctgccgctgctcataatccagaatttgctaaaaaagcgggcatttcacaaagtgcagcaaaagagtggaacgctgctgatgagaaggaaggaaatcttaaaaaaggatcaaaactccctgataaagttaaagaatctagtatgcgtagtttggttgatattgtacaagatgcagaactagctgatacagatgacagaacttgtgatataatggattcatgtgacgatgaaaaagataagctggatgaaatgccacaacgcttcgatagttttcaaggtcaagacagagatgagtttgttgataaaactgctgaaatgactggtaagaaaaatatggtaaaattcgctgaacataaagaatatgatgtttacatgaataagcatggcacaggttttattgcttatgataaggcgggtaaacagcttgctatcgttagtggacatttatctaatgatgcagtactcggtgttcctaatgtgtttcagattgccgccacagcttctaaaaccggaactaagggtatcatctataatatttttatggatatggtagctaatggtgtaaaagtactgagcgacagtcttcataccgatgatgcaattaaattttggacacgtctaattggctcacatcaagtctacatagtaggtggtggtgaagttcttgcaaaggcaagtttagataaagttcataagtactggagtgatgatgaatcaagtccaagtgctgaacttaaacttatgttagtaaaataa

SEQ ID NO: 644 - DNA, 1572 bp, Asteriusvirus sp.
  source 1..1572: mol_type = genomic DNA
atgaaatataatcaactacaagaatctattattaaagttcctagctccactatgtcacaaataaacaaatatgtagctagtatattgtactttaaaataaagcagtttattcagcaatatgatatacaaatggatgcggacacccgcaagcacccagcagccgataaaataaaagccaatgttattgcggaatgtaaaaaaacacttaacgttttgagttccaaatatggtgctaaaaacattagcccccaatcatttaacaatattattaatcagtcagtgaagataccttttgattctgaacagtatataaaagaattaaattttaaaaagttagcaccagaagttgtggacgaaattaaaaaaactaaactatccttagttataactactgattcaactgcaaaggaacgcggatctatgactgaggtagctaataatgcatatattattagaataaacataaaattacttcctaaagaagtatattcatctgcaatgcaactgatgagtactgcatatcatgaagcacaacattttgttcaaagttctgtgataaagaaaattaatagcaaatcaaatcaattacaagtaaagaaaaattatgataaagaccataatgaatacttaagttctggtattgaatataccccacagttgggtaatgtaattgatgctatggaaaatgaagcccaaatattaattgatgaagacaatttaccagaagatccaaaagaagcattcaatagcgttttacaacgtgtattatcccgtgatgataagtataatgctcgtggatttattattagtatatataaaacatcacagaaaaagtatagaactgtaatgagcacgttatacaagaaatttatggatgcttttgaaaatattaataaaataagtactgaccatgaagaaggaccagttgaagatctaggagtttcaatcaatgaaatgaaaactctgagcgatattgcagaaagatctcgttatttagaaaccagattgtatggtcattcgagggatgaaattactaaaatacattctcaaagtaaagaacatggttgggaaatgattattactaagccatcagaaaatagggattctattattattcagatacgaagtgaatctgagaatgaaagaaatataatgaagtataaagaagcacaaaactttgtaggttcattagcaagtatggatttctccacagatgaagttgttgaatttatggatgaaatactacatatggatgctgatgatgctaaggcagtaaatggtgttgttaataaagtacaacagtggtcagaaatggttggtttaaactttgttaaaactgatgaaggatttaaacttaatgatacggagtttgtacttgaaccttatagtggaagaattgtaatatcgtcaccacaactaagaaatatgtatctagttgggtctgataaaattataacagatataatgaaatacattctgcgtttcatgaaagaagcaccagaaaaactattaaaaacattggacagggatgtttccattgttcaaatgagaagagacttagggagtttataa

SEQ ID NO: 645 - DNA, 252 bp, Asteriusvirus sp.
  source 1..252: mol_type = genomic DNA
ttgcgttatgatgtagaaactggtgagtgggaagatgcattaacacctgatgttattaaaacggttgaaataccagtagggtatcaatttagagcacctaataatcaagattatgtgtttcaaggaaaacaatggagaagtaaacaaactggtaaaattgcaccaaaacaaataggtgctaagataacagatatagctaaacgtttgattaaattaaaaggaaatgaccaggaaggaacagatgaaatataa

SEQ ID NO: 646 - DNA, 309 bp, Asteriusvirus sp.
  source 1..309: mol_type = genomic DNA
atgagttatgaagaattatataaagcaataatggaagcaattgctccaacagatgtagagtcctcacatcttaaaacaattgaacataatggtaaagacttgtatattacttttaaaaatggaagtacatacgagtatgatgatgtacccgaatcattagtaagacacatgttaactgttgattctaaagggagatttttatggagatatatccgtgataagtttccatatagaaaaactagttctatctccaaaagacgtatacatcaaatccaaatgctattaaacaacgtttgcgttatgatgtag

SEQ ID NO: 647 - DNA, 546 bp, Asteriusvirus sp.
  source 1..546: mol_type = genomic DNA
atgaaacatactatcgaacaacaagtgttttcacttcaacagttcagcgttgtgaaagccacatataaagattcagtttattacttagcagggagtaatgatattactccttatgtaacaaaactacaatctgaacatagtaaagttgataataaagtacttaaagctggactagaattatttttaaaagaacaccctgaaaaaaatcagttggatgttcctaagtttcactttattttgttagatgatcctaccacacatgcagagtatgttgagtgtgtttgtagtgaagtattccacatggaccaagaccaagcatgggaggttattgaagcattaaactcttcagtacattcatatcatgtaggtacatttactgatgaaatgtgtattacattcgctgcaatgattgacaatggtaacgaacaactacgtcaaaatttaaaatatgacaaagttccatgccaagcaaatggtaaagactatgattcagcactagaagttctagaaacactgattcgtaaagattacccagatgatatttaa

SEQ ID NO: 648 - DNA, 504 bp, Asteriusvirus sp.
  source 1..504: mol_type = genomic DNA
atgaaatctattattgccaataacgaaatcaccgcaaaaactgtacgtcttgttacggaaggtgtaagtgaggtcatggcaatctctaaagcacttactttagcagaaaatcaaggattggatttggtggttattggtgcaggtgatgaacctgctgtcaaaattacagatcttaacaaatacaaatatgagttgaagcaagctgaaaaggcttctcttaaaaaacaacgacaaaatgccgtgagtattaaagagattcaattcaactttggtacacaagagcacgatttgcagattaaagcaaaaagtgctgaaaaattccttgatgaaggaaaacatgtacatattgtaatgaaaacttcaggacgtggaactaatgcatcagtaattcaagcaaatattaatgcaatggaatcattcgttaatcgtttgggtaacgtttcatatgttcaaaaagtcgagttccaaggtaaaaaggtaacctgtactgtcaaagtaaaataa

SEQ ID NO: 649 - DNA, 195 bp, Asteriusvirus sp.
  source 1..195: mol_type = genomic DNA
atgactgacaaaacattttatgatcgtattattgaagacaagggagtttttgataaggtagtttatgacctagaacttatgatcaaagacgcaccaaacccacgtgtgcgaacccaagcagaatttgcaaaaacttatcttgttcaagttcaagcaatctgtgaagcaattaaaaaacacaatgatagtgcttga

SEQ ID NO: 650 - DNA, 567 bp, Asteriusvirus sp.
  source 1..567: mol_type = genomic DNA
atgaacaatttactacaagtatttaaaattgaagtttcagggacgaacctagataatatcccatattatatgtatggtgattatgattcatcttccccaacaaccgcacctactgaccagcaaactattgataagtcaatcgcacttttgcgttatctacaactttcacgtttgctctcaacgtattcagtaccagtttatagtaaagttgaatttgctacacatggaactgcaaaaactatcccaactggtgcaacaattacagttggttatattagttatcaaccgtttattaacacactaagtgttgctgaccaagctgcactaactactgaagatatgaaaactgcaaaagctgctgaaataattcaaaaactaatcaatgattcattgaaaggtgacggtactaatgctatcgtaaatgaagaaataactgtacaaaaaaccattcagagaatcaagaacgcacttactacaagtactgttgattttattgaatatgagaacgtgtatcttaatgttccttcagttactgatgcatcagtagtatcttacgttaaattataa

SEQ ID NO: 651 - DNA, 1341 bp, Asteriusvirus sp.
  source 1..1341: mol_type = genomic DNA
atgagtaaaattaagcttacggataagcaacaagaaatctttgatgattttatagatcgtgtttacaactatgcaggtaagacaatttcggttttatctgctccagcaggaactggaaaaacattcactactgctgagattgtaaaagcactatgtaaaaactataatattgcagtaacttcacctacacataaagccaatgctgttattcgtaatatgctaatcaataatgctggtcttactaaggaagatgcacaagttagtacaatacactcttttttaggactaaaattagtatatgaaaagaatcgtcaagtactgaaacatgatccccaaagtaaagttagtaatactaacgttgacattcttattgttgatgagtgtagtatgatttcagaagaattatttcaacatattcaggatcaattgtggcgtgtccgtcgagcagttttattcattggtgatcgttgtcaattgccgccagttgagtccgaaggtacaatgggagagactaaattgtctcctacgtttgatgtacctgtccaatatgagttaactgaggttttacgtcaagcattggataatcctattttggcagttgccactgctattcgagagtgtattggaactagtaaaaatccatttgatattatgcatcagacatatggtttaagtactattacacctattgatgatgaagatttatttttagatgtttatcgtgaatttattatggaaaacaagggttcatctaaaaaaatatttgatttcgtaaatgaaaataaaatcttagcatatactaactatagagttaatttagctaatatttacattagaagtcaactatttgaagttccagatgaatttactaaaggtgaaccaattgtttttgaaagcataactgagaatagtccatatgtagtacaacaaattatacaatgtcctgaagtgaaacgtgaaagttttatggggattgattgttggcaattccgtttacctaatggcagttatattttaggtgtaggaccagaaacaagaattgcaatggacgaaaaactagataaacttgttaaggatattgagaaaaaagaaataaatccattgacaaagaaaccgtatatgtggcaggattactatgtaataaagaataaattgcatattatcaattatccttacgcaacaactgttcataaatcacaaggaagtacttttgataacatttggtttgatactgattttattgaacgtattggtacaaatgatactaagtgtagaattttatacactgccatgacacgtccacgatatagtgttatgttgagacaaaatgcacgattctaa

SEQ ID NO: 652 - DNA, 429 bp, Asteriusvirus sp.
  source 1..429: mol_type = genomic DNA
atgaaaatagacttatatactgatggttcttgtctaggaaatccaggcccaggcggtgttggtattgttgtagttattgataatcaaatccaggacaaactgtcatttggtgatataatgactacaaataacaaaatggagttacaagcaactattgctggtattcaatatgttaaggatacatatgaaaaccctgaaatatttgtttacactgattccaactatgtagttcgtggaattaatgaatggatagctggttggaaaaaacgtaactggaataatgtgaagaatgattctttatggaaaattctggatgaaatcagttcaggttgtaaatttgaatgggttaaagctcatgcagataatgtttataataaccttgctgaccaacttgcacgtactgctgccgaggaaatgaaaggcagttaa

SEQ ID NO: 653 - DNA, 522 bp, Asteriusvirus sp.
  source 1..522: mol_type = genomic DNA
atgtcaaaaatgattctatgcactgatgaaaactatggtattgggtgtaataattccattccgtggcacagtaaagctgactttgagcatttcaaagaagaaacagttggacgaatgattattatggggtataacacttggaaatctcttccaaaaaaaccacttccaaaacgtttgaatattgtcctagtttctcgtgagtgtgatgatattgaaaaatattcagatgataagaatgtcatgttcttgcctgaacaatgcttacctgagttgattcgattaaaccctgaatgtgttgtcattggtggtgctaagatttacaaatctgctcttccttatgtgaatgaagtgattcacagtactgtcaagggtacatatacatgtgatacctttgttcgatttaaggatgataagcgtgtaaaattatcaaggtttgagtctaaaacattatctgacggtacgattgttgattattacgagattgttcatgtttacgatgattggatggatgcataccaatga

SEQ ID NO: 654 - DNA, 369 bp, Asteriusvirus sp.
  source 1..369: mol_type = genomic DNA
atgttaattttacaaataatgtggattgatataattttgacattcatttgttctggatatattggatttgctagtattttgtactgtatctctcttgttgttttggggcttatggtacatttacataaaacacttattcattatataaaaataaaagaagaaacaataacgcgtgatttaccattgatcactagttcatttcctattggaaaaaacacttatattaatattttaatgtcaacaattatacatagtattatttcggtgagtcttcttggaatgcctttacttggattgggaattgtgatattatccatatatcgtattaaaaatgaaaaagatttagaggaacttgtatgtcaaaaatga

SEQ ID NO: 655 - DNA, 132 bp, Asteriusvirus sp.
  source 1..132: mol_type = genomic DNA
ttgttaattatactactatctaagtcgatattcatatacctgttaatctccaatcttattgttatttttataaagtatttacccatttttacgttttacatagtttatatggagaaagaagtaatatgttaa

SEQ ID NO: 656 - DNA, 663 bp, Asteriusvirus sp.
  source 1..663: mol_type = genomic DNA
atgcctgttattagaacaatagtagtgacgttatgtcttgtattggggtttgtagtttatataacttccagttcatgggaaacttatataaacaataaacttaatcacccagaacaatttgaatcgtttaaacctcataagtatacaatttcaccagaaaagttggagagtattgataaaagcctatataaatatgtttctgcaaactctgatgatattgctatagttttggtttacaagtttgttcctgataataatacattctatcaaggtagagtacttgttacagacgaaacaaatgcatctatgggattaaatattaaatcttacaatttggattggttacccataagtgcttttagtgctgagacaaatacattactaagggggaaaatattttgcgttgaaatttctaaaatttacacagaatatttaaatcctgataatgaagcacgaaatgagtatctatcacctattaactttccagcaatagttcaagatggtggtgtttatcttgtttcagtaccgattaagtacacttcaattgaaggatatgttagtgtttatttcaaacgtgtaccacaaaatgtggaagaagctgagaagtttcagagacttgcacaaaaagttgttaatgaagtaggatattatatctcattttaa

SEQ ID NO: 657 - DNA, 318 bp, Asteriusvirus sp.
  source 1..318: mol_type = genomic DNA
atgtcaacacagaaaagaatttactattctattctaagagtgttaattgtatgttcttgtatcactttgagtatttttctctttcttaataggtcacaaatagaaaatagaattaccaaatcggtaatacccagtattgaacaatatttttttaaaagttcgttggaactggataaggtaaatgaatcttttgctaaaataatttcaaaacattcagatattagtacggtggttctatacaaatttgtaccagacgaagacactaaaatgtataaaggccaagttcggactagttctaagagatcgctctggagttag

SEQ ID NO: 658 - DNA, 339 bp, Asteriusvirus sp.
  source 1..339: mol_type = genomic DNA
atgcgtactgatatgtacactttagacagaagcgatagagcatatcaagaaatatttcttaataaagttcattatgaaacaatcattggatctaaaatggaatgcagtttatactatgataattccaaagattattcatgcgatgatgttaaacatattcgttatacttataacacaattataactattcctattttagataaggaaaagtatgaagttgctggttatgttatgattacaacaaataaaacattgaatcaacatgaagtgcagaatctgattaacgacatcagaccgtacattcgtaactttgataattcaatacaagatattaaatga

SEQ ID NO: 659 - DNA, 732 bp, Asteriusvirus sp.
  source 1..732: mol_type = genomic DNA
atgtcaacaacattagatcaatataaacaagttgtagagttcatggaagtatgtaaccagccagttaacaccactcgaactttccaaacttctaaaattgcaaatcttcgaattgagcttattaaagaagaaatttttggtacaggtgagttggttgattctatcaataaggattctaaggttggtattctagatgcattgtgtgatattctgtatgttacatacggtgcaatcgctacttatggctgcattgatgcattgggtgaatacgaaattacaatcgaccctgaaaatcgtaaaagtcaactactatataaacatactgctttgaattatgttaaagaattaactgactattttgagcaatttaaacgtggtgttgaaattggtgatagtcgcactatcagtgatggactagttcgtattgtatcttcatgtgtatcattcgctcgtgcaagtggatttgacctagcaggggcatatgatgaagttcaccgtagtaatatgagtaaattttgtaaaacagagaaagaagcccttgaaagtattgagtttcgtcttgcagaagcagatacattatcaagtccaccaaaacgcattgaacaaaaagataattatactggtgcttatgttgagcagagtgggaatgtattcgttattaaacgtggaaaagatggtaaaggtttaaaaggaaaagacttctttgagccagacctgaccaaatatgcttaa

SEQ ID NO: 660 - DNA, 396 bp, Asteriusvirus sp.
  source 1..396: mol_type = genomic DNA
atgcagtatatcttttcaaaagtaaatgaaaactttcctaaacaaaaagtatatagaagtcagcgtactcttaaaaaaatgcatttggatgggtatgctgtgtctttagcttctattgttattccagtaaagcttttttcattagaccaaaaccagactgacaaatgtttagatgtaatttatgaacatgatgttgggtgctttatttgtagttctgatgatggctttactattcttcatgagtttgattcgttatatgatgataacagtactgaagaatatattaaaacatttacaaataaattaatgtgcgaattatccaatattgaaatggaatttgcaacagttgaaacaatcaacatcacttatggtgatgcatattatggagaatggtaa

SEQ ID NO: 661 - DNA, 234 bp, Asteriusvirus sp.
  source 1..234: mol_type = genomic DNA
atgaacattaataacctaaatgaaatggtagaaaaaaatattgatgctgctgaagaagtaactgggtatgagttaacaccagaagatttagaactatctaaaaaaattattgaacagttatctggatattatgttcgtaaagaccagaaaattaaagaacataaaaaagcaaaagcaaaaaaccgaactcgcaacaaactagctaaaaagtccaagaaagctaatagaaaataa

SEQ ID NO: 662 - DNA, 168 bp, Asteriusvirus sp.
  source 1..168: mol_type = genomic DNA
atgaaagatatttttacgatagatgctaatgtcatatatgatttttatcttactggtggtgtgaaggtaacgggtactgtgattgatgtttgtgataatggtataatcttaagtgatggtactagagttgtccaaacacacatcattatgtttgtcccacatgtataa

SEQ ID NO: 663 - DNA, 351 bp, Asteriusvirus sp.
  source 1..351: mol_type = genomic DNA
atggtaaaaatagcagaagagtgttatgatgaagtactggaaatgtttatgtctgctatccgtcaagaagaagcttgggcagacttcctctttaaagatggttcaatcattgggctgaatgcagaaattctaaaacaatatgttcgttggattggttctaagcgtatgactgcactaggaattaaatgtccatataccgtatctaagagtaatccactaccttggactgatcattgggttagtggtggttcagtacaagttgcaccacaagaaactgaaataagttcttacatcattggtggtattgtgaatgatatccaagtagatacattctcaccattcaaactataa

SEQ ID NO: 664 - DNA, 780 bp, Asteriusvirus sp.
  source 1..780: mol_type = genomic DNA
atgtcagttttcaaaattaacgagaagtctcacctagaaaaaaatatgttttttgatgaaagtgttgatatccaacgctttgaaagtaacaaatactctacacttgaaaaactaacagagcaacagaaaagtttcttctggactcctggtgaagttgacgtatctaaagataaaattgattttgccaaccttaatgattccgagaagcacatttttacctctaacttgaaacgtcaaattcttcttgattccgtacaaggtcgtggtcctaacttaatgctacttccctatgcatctctcccagaactagagaacttcattgagacatgggcattcttcgaaggtgcgattcatagtaaatcatacactcatattattcgtaacatttatcctaatccttctgaagtatttgatactatgttggacattccagaaatcactgattgtgctgctgatgtttccaaatactatgatgatcttgatgtactaggtactctataccgtgcattaggtgttggtacacatacaatcaatggtgaaacagtcgaaattagtttatacgaactaaagaaaaaactttggttgtgtctgaatagtattaacattcttgaaggtgttcgtttttatgcaagctttgcgtgttcttgggcgtttgctgaaaacaatctaatggaaggtaatgctaagattatccgtctaatctgtcgtgatgaaaacctacacctagcagcaacccaaatgattctacgtcttctcaaaaagaagatccagatatggtaa

SEQ ID NO: 665 - DNA, 2319 bp, Asteriusvirus sp.
  source 1..2319: mol_type = genomic DNA
atgattaacgtaaccaagcgtaatggaatgaaagagccgttatcattggataagatccatcaaattttatttttcgctgctgaagggttaagtggtatttccgtttctgaaattgaaatccgtgcacagcttcagttttatgaaggtatagaaaccagtactattcatgatattctaataaaagcagcagcagaacttatttctgaagatacgccgaactatcaatacgttgctggaagattattaaactatagtattcgtaagcaagtatatggacagtatgacccaattaagtatactgctcatcttcaagaaatggtagatactaaaatatatgatcctgaaattttggagaaatatactcttcaagaaatagaagagcttgggcgttatatcaaacataagcgtgacgacaaatttacttatgttgctatgcgtcagtgggaaggaaagtatctttataaaaaccgagtcactaagaaaatttatgaaaccccacaaatggcatatatgactattgcagcaatcatctttatggagtatgatcgttctgtacgtatgtcatatgttaaaaagttttatgacgcagtaagtaattttgacatcagtcttccaacacctattatggcaggtctacgtactaacacacgtcagtttagttcttgtgtagtactgaacgttggtgatagtttagatagtattggttcatcaaatcacgccattctacgctatatctcacgtaaagctggactaggtattaatatgggccgtattcgtgctctagactctgagattcgttcaggtgatgcagtacatactgggttgattccttttatcgcagcaactgctaagaccgttaaaagctgctcacagggtggtgtgcgtggtggtgcagcaactgttcacttcccattgtggcatttggagtttgataacctagtagtacttaaaaataacaaaggtacagagtttaaccgtgtacgtcaactagactattgtttccaagtaaacaaaactttatatcaacgtttggttgatggaaagaacattacattctttagtcctaatgaagttcctgggctatatgaagcattctgttctgaccaaaaagaatttgaaaaactatataaaaaatacgaagctgaccaaagcatccgtaaaaaatccgtacctgctgttgaagtattcagcactctaatgactgaacgtgcagaaactggtcgtatctatattcaaaatattgaccatgcaaacactcactcaacatttattgaatcaattgctcctatcgaacaatccaacttgtgtcaagaaatcgcactaccatctgtgccatttgatgatattaatactggtgaaggtttgattagcctatgtacgttgagtgcaattaactggggtaactttgataaaccagaagatatggaaactgcatgtgatctttctgttcgtgctcttgattcactattggactatcaagactacccagtagttcatgcggaccgagcaacaaaaatgtatcgtccactaggtgttggtattattaactttgcatacttccttgctaaacgtggtttacgttataatgaagcagcactggaaacagttaacgagtgggctgaagcatggtcttactatctaattaaatcttctgtacagcttgctaaagagaaaggtaagtgtgaaggatttgataatctaaaatatgccaaaggtattcttccaattgatacttataaatctgatattgatgaattagtaactaaagaactaaaacaagattgggaatccttacgtgcagatatcaaagaatatggtattcgtaacgcaacaacaatggcattaatgccagcagaaacaagtgcacaaatcagtaacagtactaacggtattgaaaagccacgttctcttgtaactaagaaactatctaaggatggtattcttaaacaagtagttccagaaatcaataagttgaaaaacaaatatgatttactatgggatcagaaagataacattggttatctacaaatctgtggtgttctacaaaaatacattgaccaaagtatcagtgttaatactagctataacccaatacacttccctgatggtaagttgccaatgtcaactcttctaactgaacttatgtatgcatataaggttggtttgaaaaatctttattatcataataccaatgatggttctgatgaagttgacgttgaaaaagtactgaaagaagctgccaaaccagaatctgggcaatttgtattaccatcacttcctgatttagatgaaggtgattgtgatagttgtaaaatctaa

SEQ ID NO: 666 - DNA, 582 bp, Asteriusvirus sp.
  source 1..582: mol_type = genomic DNA
atggcacaacaacaaattgctttacaacaagtaagaactggtaaacagagagacttacctgatgcattagaaaaaggtcagataggattcagtactgatgtgggtcgtgtttttattggccttccatcatcatctgacccagccagcttagtcgctggaagaacttggactactgatccaaattcaggtaaagaaaacgtagaaataattacagaattttcaccgtggagaacggtatcaaaaataattaatagaccgtttaaagttgatcttccacaaaatcaagaaagtatagaagttattcttgaaagtgaaagtagagtattcatcgattatattgcatatgatgatacagaaacggttttagaatcaggaactattcaactagtagccgctggttcaaacacaatgattgcacagtctaataacacaaatcgtactgatgcaattatatctatctcatttgaagatcctgcatatgattcaataactggaaatatgcaatttaacatagttaactcggattatttaaattcaggatatcatatagaatttgtatatcgtgggtgggacaaaccttaa

SEQ ID NO: 667 - DNA, 555 bp, Asteriusvirus sp.
  source 1..555: mol_type = genomic DNA
atggagcagcataaaaaaatgaaacaagatctatatacaattcgtgcactagtaagtaaaggttatgatttagaagaagtaattaaacttagtgaagaagagattgataaactggatttatcaaataagctaattctaaatatcaaagattataaacaacgtggtgctaaacctgttgaagaaattaaagaacaaattgcacaagatattagtgttgatgaagtatcacgcaatgtaccaccagaagttattcaagagtatgttgttgatagtgaagaacaagttaaagtttctgaagaagtagaaattattgcagaagaacttgctcctgaattggaagaagatgaagttgttattgagcgtgttgtttcatctaaagaagatttggacattatcaaagaagcattgcaaactaaagaattaaaaagtgtttccaattatgttaaacatttaaaatctttagtaccagaacaaattctatcttctgtagatagctcagttgtatctcaactaattaatgagcgtattgcggaagttaaagaaaaagctaaataa

SEQ ID NO: 668 - DNA, 720 bp, Asteriusvirus sp.
  source 1..720: mol_type = genomic DNA
atgtacacaccaccaattgttagcagatatacatatgttggttacaatagaattgaaggcggcccagaaggtcgcctttattcaactccaactggtaatctgccgtcagtaacaacaattctaagtgcgacctcgaatgacgaaggtttaaagaaatggagagaatttgttggtgaagaaaaggctaatgagattacattagaagcatgtacagttggtacttttatgcatgagaacttggaatttagattggaaggaaagccagaccatgaaggtggtatgccaattcgagttcttgcacgtagaatggctgacaaaattcagcaagaagcatggcctagaattaatgaagtatggggacaggaagtcccattgtactatgaaggtttatgggccggaacaactgatttagtaggtgttcatgatggaatcccaaccattatggattataaaaattcccgtaaagttaagaagtggggacaaatagaaaattatcgtatgcaaattgcagcatatgcattagcccataatcaaatgtttggaactaatatagaacgtggtgtgattttcatctgtgtaagaaaagatcctaacaatctacaatatcaagagtttgtcatagaaggacaagacttcaaagatgcagtcaatatgtggattgaacgtgtagaacaatactatattttacgtggagaaattgaatcaaatggagcagcataa

SEQ ID NO: 669 - DNA, 336 bp, Asteriusvirus sp.
  source 1..336: mol_type = genomic DNA
atgagatttcgtgatcttactgaagaggctcctggtaaagatatacgcaatatgattactactattgcgttgtctttagtgtccacgggtcgagaagaagtaaatgttcaatctttgatttctgaaattaaaaagagaaccaacatcgatgttccatacaatgtaatgatggacattttgaattcccttccttttgtacaggatgctaattctgatgttgtaacttttgcaggaaattcagcagaaggttcagaagaagtcgagcaagattctgaagagcaagttgaagattgggccacaaaagctgctgtgacagcaaataaacaaaaaaactga

SEQ ID NO: 670 - DNA, 633 bp, Asteriusvirus sp.
  source 1..633: mol_type = genomic DNA
atgtcaaaatataaaaaactaatggaagcagcttctcgtgcagaagctatgaagtttattcaattaaatgaatctaatattgaaaaagcagaaattgttctttcagtaaaaggtgagattgttgataaactccaacgtcaatctgaggttattaacaacatgggtgttgacgtactaggcccactacttgaccgtattaaagccgagcaaggtctagatgctgcacaaaattttagtgataatgttcgccatctactacaacatgcagttactaccttaatggatgtaaaagacaaaatcagtactgaaacacttaaactaactggtgatatcactgacggtccagatgtttctgatattggaagtgaagatgttgatattgatattgcagcagataccccaacttttgatatggatgcagacgcagactttgaagaagacattatctctgaaccagtaccaactgaacgtgaaatgaaagaatctgttaaaccaagtaaagttggtgtaaaaatggaaagtattcgcggaactgtgggtactaaatactttagttcaaaagaagaaatgaaaacatggctttctgagaatgaaaagaaagttaaacgtgttctaggatacgttaaaaaataa

SEQ ID NO: 671 - DNA, 672 bp, Asteriusvirus sp.
  source 1..672: mol_type = genomic DNA
atgaattacgaatatgatcaacaatcagttaatcagatggctgatttgttaagtggattgaatgacattgaagctggtgaaacacataacgcatcaggggttccatataaaactggtggtgatatcggtgctatggcttctattttaacttcattgaatgaagcaggtatggattatggtgaaccgcaacatccacatatggtacaatacaattctccatataatgaacatttatcagggaattcaccagtacaatcaccacgaccatcacaagcacctattaaaccaaaaactaattggagtttagtggaagaaaaagtacaaggtactaaatctacaaaagtttatagcattaagtgtaatcatagttcacaaattattatgaataatattatgatgtatgaagcagcacttacattagttaaccttctcaatgaaggaagaatgttgacagatgcaaaagtacttggtataatcagttcgggtcttcaatacacgaatgtgattagtgaagcattgaaagcagcccagaaacgtcaacgcgtacttaatgaatcgaagtatgatgaagcaaaagatttagatataattattgcagaaaagaaagctgaagcgtataaattaaaagagcgtgtattaaactttctaaaaggcgaaggttatataaagtaa

SEQ ID NO: 672 - DNA, 219 bp, Asteriusvirus sp.
  source 1..219: mol_type = genomic DNA
atgagaacagtactaaatgtgcatggtcacaatacaatggtttctaatgaagaatataaactattacaaaagataaaagcacgcggtactgttccagttgaaaaggtaaatgaatattatcaggaattagctgataaaatggtatcacgtggtgttctaaataaaatagaaaatgatgacggtactgaatcttaccaaacagttaggagtagtaaatga

SEQ ID NO: 673 - DNA, 945 bp, Asteriusvirus sp.
  source 1..945: mol_type = genomic DNA
atggatataaaccaaacagcaactgaacttcaaaagttcgcagatgcacataatttgaatgttgatgtttctgttattcttgataatatggatgcaggtgattttatcactttaaattctgcgattgataattctgacaatcgtgaaatattccaaattttacaaaaatacaaagcacagatgagtgaatgttataattattttagtactaaaaatattaacaaacatattaatgaaagtactgaacttcatagtattgttgattcaatgtcactaacgcaattatcagaagagtatcataaaaactatacatattcagatataacaaaactaaccacacaagaattaaaagcaattgtatttgaagatttacaaaatcaagccacacaaatgcaagcaaaacaaattgctaaaatgaatgtttctcagggtcaacaacaagtcaatccacaaactcaagctaaaatgaaacaagctgagttgcaaagaaatgctaataatatgaaagttagtgttccaggtacacaaagcgggaccgattcggttgagcctgtagttggtgttgacccaggacaaacaccggagcagtcattagttattactaaaagtgggaccaagccaaatgagttgaacgtttttcctttgagtgatgttaatcctattgataatgaaaataatccaattcgtgaagaaaaatctccacaagaaattaacagtgaacttatggctaattccagtttagagcctgatagtaatcctgatacaccatcaccattgtcacatcatgcacctggtatgggtgaaatgatacatgcaatttctgatattgaaaaagaagatgatatctatggtgatgaaagtgttatggcaaacacatcacaatctgataatgatgacatggtagatcaaattatcgatttctgtcatcgtatgcgaggtcgttaa

SEQ ID NO: 674 - DNA, 393 bp, Asteriusvirus sp.
  source 1..393: mol_type = genomic DNA
atgaaaccatatacattctacacaattcatactgtagtagatattggtgatggtaaaaccccaacaatcatagattctaagttcactggtgctatgaacttatctaggttgttggaagctattatggtatatgactatccaatgatggtaagcgttgttaaaaatgaagtcgatttatataaagataataattcatctttttataacatgccaatttcttggggaaaatgtaccataagcacattcaaattcgcattaccaatggatgtcgaacttcgtttgaatggtataccattggttctaccaaccgaattaaatggaaaacgaataacaaaatttatcacatctggtgatgatattaacattagcatcagcaaacagaccttttcttaa

SEQ ID NO: 675 - DNA, 165 bp, Asteriusvirus sp.
  source 1..165: mol_type = genomic DNA
atgaagaaaaagaatatcaaagaaaatgcatcttctggagctacttccgcaggtgctattgcatcagtcagtactggtttacattatccattacatcgtagattgcctcctactaacttctttggatacaaagtcgtagagaaaaaagataaggacaaagaatga

SEQ ID NO: 676 - DNA, 273 bp, Asteriusvirus sp.
  source 1..273: mol_type = genomic DNA
atgtctagtaaatccaataaaaagaatctacttgatagtatagttgactatacaccagagaaagatacattacagagttttagtaatcgtgccgaccacgcaataaactctgtgattcatttattggagagcattgaagatgagtttaaccaaactgatgctgaagatttaaaaaaacgcttatttctaagtataaaaaaccgagattataaaaagtttcaaaaagggttagagaatatagcacttgatgaaaaacgtaataaaggaaattaa

SEQ ID NO: 677 - DNA, 1521 bp, Asteriusvirus sp.
  source 1..1521: mol_type = genomic DNA
atgattcaaagcacagtggatgtgaaacaatatgggattaatgcacaacaatacttattatctcagattttcagtaatcctgatttatatgtacgttgtaaaaatatccttaaaccagaatattttgataaaacatttcatgaaagtattcaatacgtgcatgattatgctgcaaaatatagttcatcacctactttaaaagatattgaagttaaaggtggttatcaatacgatcaatatgaagttcaagaattacataaacaatcagtacttgatacatgtggtgaattttgtcgccataaagcattagctttagccgttgaaaaaggaatggaacttgtccatcagaaaaaatatggtggaatcgaagaactaatccgagaagcaatgttggtaacggtacagaatgagttaggtttggatatttttgaaaaccctgaagatacaatccgctcactcagtacaatgcaagggtcatttaagagtggttgggaaactcttgattacaaacttttcggtggatttgggcgtagagagttagagatctttgctgctgcatcaggtggtggtaaatcagtagtactgcaaaatttagcagttaactttgcgaaagctggaatgaatggagcatacatttcacttgaactagctgaagagttggttgctgttcgtatctatggtatgatgactgaatcaaaactcagtaacgtaaaaaatgaagctgaaaagattggatttgctgttaaagttgaaggtaaaaacagtggtatgttgcgtattaaacgcttacctgaatctgtaacaaccacagacgatattgaaagttatctacgtgaattgcaaattaagatggaaatcaaacttgattatgtatgcgtggactatttggatctattaacttctaatcgtcttggaccaaatgataaatccaatacatttactaaagataagtttgtatcagaagaattacgtgcactggcaaccaaaatggatttaactgttttcactgcatctcagtttaaccgtagtggtatggacgaagataagaaaagtcaaagtcagattgctggtggtatttcaaaaatttatactgctgataacgtaatttatattgaggcacgaaaagaaactggcgaactatggtttgatttccaaaaaacacgtaacagtagtgcagtaggttcccgtttgcgtatgtcatatgatattgattcattgagagttcttgaccacgcaactacagtacaacaaatggaaacagaaggtaacggattccgtcacagcggtgtttctaagattggtggagggaacatggcgttaccacctagcactatgcaaacattacgtcatacgctttctggtgcagctaaaccgccatctattcaaccagacaatactgtaacactaaatactgatagtgctcctaactctacgacacaaaacgaaatacagaatccacagacacatgctggtactgatcgtgttcatgcaatgaagcaatggttaaatcaaaggaaatga

SEQ ID NO: 678 - DNA, 1056 bp, Asteriusvirus sp.
  source 1..1056: mol_type = genomic DNA
atgaacgctgtacaaaacataatggcacaaattatgaatgatccagtacctgcgatgggtacatggtcacatcacaactgtccagcttgtgtgttcagaggacattcaaggccggatacaaagcaccgtggtaatcatatgttcaatgcagatggttccgtttcatataactgctttaactgtagtttaaaaactggttggcaaccaggaaaatatatgagcaaagatatggagtctttgctcatttcttttggtgcacaagataaagaaatagaattagttaagttttatattaaagaaatggttgacagcggtgattttgctgcacaagaaactgttgcatcaaaattgtatgaccgagtaacagtacgtgatttgccatcaaatgcaaaaacattttgggaatgggcttctttacctgaagataaaattccacaagaatttataagtgttttgcataatgtcaatgaaagaaacccatatctgttagacttagaattatattggtcacctaataaagaacataaaatgtatgacagatttattattccatatttcatgaatggtaaaattattggttatactgcacgacataaattaaaagatcctggaagtacatacaggtttataaatcaagtaagtactaatatactatataactatgatttattaaaagatgaacgaataaaaacaattttagtatgtgagggtccgttagacgcagcattaatgggtggtgtatctgctaataactttaaattatcaaacgtacagattgatgtattaaaagatgcacagcaaaaaggtaaaaaaatagttattgttccagatagagataaagatggattaataactatagaccaagcacttgaaaatggattcagtgtttccttcccagactttggtgctgtaagagaaggtagtacaatacgtcatatcaaggactttgaagaagcttgtgcacgatttggtaggttattttgtttacaattaatacatgatagtatagtagatgagccattttatattaaagctcaaacggataaatggatgtaa

SEQ ID NO: 679 - DNA, 978 bp, Asteriusvirus sp.
  source 1..978: mol_type = genomic DNA
atggctcatcacggcgtgtttatgtacccttataatcaggaagtatcattgggcaattttaatatgccatatagcaatgaaaaactaactatatatagaggggcaaataataatttatcttttactgttcacaacgctgatggaaaatatactttattgaaagataatgaatatcttacatttatgatttttgatgcacgaaataatactaaactatttgatgttgtattagaaaaacaagaacccagttggttatcagaaagtggacaagcaagacaaacattaggaaataaaaagaaagtatattatggatgtattgttccagcaggagttattcaagataccagtcctggttcaaaatatagatggagcattactaaagtaacaatggatggttcacttatagaaccaacacaatatctatacacaggaatgaactttgaagcatcagcagagctaataatttcagaccaagcagcacctgtatttgtccccagtactgaaatatcagttaataaaaatccagcatggacaactataaagcgtttatatcatgaaccaattggaaatggtatgattggtgaatatgatattctcgcatcaactccattaccagcacaaatgcagtttggattggtagatggattaagtagtattgcaatctattttgataaattcattggtagaatacagctacaagggtgcttgtgtaacaacgtacctaatgataatgaaaactataaatggtttattattaaattagatggaaaggattatattgaaaatggaattgattcagacggttttccaaaagaacttgatggaatacaagcatttaattttaaaggaaattatatgtggttacgtttggtggttgctattcatcccaaaattgttccagtgccatatgactatgctgctgtccgaaaagtgtatgaccctttcctaacagtacctaaaattttgatacgtagatga

SEQ ID NO: 680 - DNA, 354 bp, Asteriusvirus sp.
  source 1..354: mol_type = genomic DNA
atgaatcaatataacactattccaccattcattactgtaatccagtatgatggtaaaacgtttgttggtatcatcaaaatcaaaagcaaacagtatacaactctttactgtttcgatgatatggatgattcaatgcaagacgaattgttaggtatagcacacgattggtggtggcaaagtaatagaaccattccagtttgtctattctttcaagaagagatggagaaatttgaaccgtacacacagagattcgatacaccgtcggtgaatttcgtatgtggtccagtagtttctttaagcaatttgccacaaaaacgcatcaagcgtcgtaatgtggctcttaagaagaagtaa

SEQ ID NO: 681 - DNA, 639 bp, Asteriusvirus sp.
  source 1..639: mol_type = genomic DNA
atgcaggattcgaccgattctaaacattatagaaaagcccgaactgatattgacattgacttcaaggatagtaaaagcgtaattgcaaaacttccttgcgtgcgaagtactgaaaaaattacggaggatggtttaatcccccataatagtggtgttcattttgataatataccaattgatccaataaccggattggcaagtatacaatataaagaagctgaaagtctaggatatcaaaaagttgatattctttcacagtcagcttacatgtatgttcgtgatagagagcatttaaaagaactaatgaatcaggaaccaaattgggatctattattagaaccggaaattgtagaacatctttcgcaaattaaaaaacatgtaactttattaaatgtatggaaacctaaatccatagacgaacttgcaatgtttattgcaatgatacgccctggaaaaaggcagtgccaaagtatgaacacatgggacgaagttaaagccaccatatgggattatagtactatcggcactgaccaagcaggaaataaattacgatatttcaaaaagccacatgcttatgcatatagcttaatgattgttgtacaactaaatgctttagttgaacatcttacttcttcttaa

SEQ ID NO: 682 - DNA, 330 bp, Asteriusvirus sp.
  source 1..330: mol_type = genomic DNA
atgaatggaaaaagtatatataataaaataccagaagggtatgtacctgtacctaaagaacaaaaatcaaaacaaatatctctacttagacaaggatctattactgaaataactttagatggtaaaacatttcaagttcatgatcctgctcgtattgaaaaaattatttctttggtagaaagacacgaagaacgatttttcagtttaagtcaagagttggcaaagacaaaacaaaattgtagactattagagaatcaaatatcaactttgactaatacagttaaacagttacaggagcaaataaaaaatgcaggattcgaccgattctaa

SEQ ID NO: 683 - DNA, 2049 bp, Goslarvirus sp.
  source 1..2049: mol_type = genomic DNA
gactatcttaaactcatcgatacgatccttgaagctgattactattaccatgttaaagcggaaccgaaatacaccgacgaagaatacgacaacatggtgaaaacgatacgggaatatgaagcaaaacatccctgcctggtttcacctaacagcccaacccgtcgtgtaggtacaccggtcgatggttttgagacggtgaagcatccgtctccgatgatgtctttggataacctgttcagtgaagaagagttgcggaattggacggagtccatcgcaaaaaccttaggggtagcagaagacactcttgaatatctggtcgaacctaaatacgacggattagcaattgcgattcattacgagaatggcctattgcaacgtgcagtaacccgcggcgatggtgttcaaggcgaagatgtcacatcgaatattcgtacggtaatgggtgttttaccgcaatcgaagatgggaacattaatgccgcagaaaatcgaagtccgcggtgaagtgttgatgccacacaaagcattcgaacttctgaacacggaactcatcgcaaacaatgaaaaaccatacgtaaatccacgtaacgcggcatcaggtacgttacgacgtttggatccacaaaccgttgcaaaacgtcgtttgttgttctgcccttacgatgttttcatggatggtggtaatatttacacgtttgcaacgcagggatcaaaaatggggtttgttgccgcattaggattaggtctatttaacgaatcgcatatcgtcgttgggactgaagcgttaattacggtgcatcgcgatatacttgcaggacgcgagcaccgaatgtttgatattgacggtatggtgataaaactgaacgacgtcgcgatgcaggagaagctcggcgcaacctctcgcgcaccacgttgggcgcgcgcatggaaattcccagcgcaagaaaaagccacccgtttgcttgatgttgattttcaagtaggtcgaaccggaagcatcacgcctgtggctcgcgtcgaacctgtgttcgttggaggcacaacgataagcaacatcacgctgcataacgaagccgaaataaaacggttaggtgtgtgcattggtgatgatgttgttatccgccgcgcgggtgacgtcattcctcaaatcgtgagtgtgcgtcccggagaggaaagaaaagaaatcatttttccaacccattgtccaacctgcgggacagtattgacgaaaaaggaaaatgaagcgcgttggcgttgtcctgcaaccggaacttgtcctgaccaagcggtagcgcgtcttattcattgggtaagtcgtgacgtcatggatatcgaaggtgttggcgaacggttcttggaacaggtctacaactgtgggttggtgcaatctgcggttgatctctatctgttaactcgtgagcaggttagccaactggaagggtttacggattatagcgccttcaaggttatcgacgctattcagaaatcaaaagagactacgttagcacgtttcatctacgggttaggtattcttacagtaggtaaaagcacagcgcgcgatcttgccaacgcgtttaagacggtggatagctttttagctgctgataaagaaagcttactcgcagttgaaggtatcggtgagatcacagccgatcagatcctaacgtacatctacgataaagcaaatcgcggatatatcttcgatttgttgtacgatgtcggtgtagcgccagctccagttaaggaacgcgaaatgaatcagttaccgttattagatacgcgagtcgttatcacgggaagtttcaacaacatcgatagaaaccaactcgccacgcgtttagcgaccatgggagccacaatcacaagcggtgtaagtaaaaacacaacggttcttgtctgtggaagtaatcccggtagtaaactcgcgaaagctgaagcgttggggattcccgttatccaagactgggatgcaaccgataacgaagaagaaagtatcaacatgcttatttcgatgattgataaggttaaggagaatagaaaagatgggtaa

SEQ ID NO: 684 - DNA, 321 bp, Goslarvirus sp.
  source 1..321: mol_type = genomic DNA
atgggtaaatgttggacggataaagaagatgaaacactgctgcttattcttagcacgtcaccaaaagcgagctataaagaagtagcgcgctgcatgaaccgaacaccgtgctctgttcgcgcacgttacatcaagttgagaaaacaacggggtgacctaccacctcgtgggggagtatatacgccagaagaaagggttagggttgccacgcttgcaaagaaacatacgctaaaagagattgctgaaataatgaatcgtagcgtacatgccatccggtgttattgttttcgaaacaagataccgcttaaagtaagacgttga

SEQ ID NO: 685 - DNA, 480 bp, Goslarvirus sp.
  source 1..480: mol_type = genomic DNA
atggtcaaggactggacacccgaagaagatgcgatgttgattaccctgtaccgaaacggtataccgatgcaagagattgcggtacgacttggccgaacggaaggttcggttcaaggtcgaattaaccgtaatcgcaagcgctggaaactcacgtcgcgtcaccgctattgttgtttcgaagaacgcgtgatgttagccgattatctcaagacgcacagcgtgaaagaagccgcggtaatgttcaatcgtagcgtggatgcgatcgctaaactctgctaccgctacggtattatcgcgtgcaaagcgcaacgtcgagagatgatctatcaccgaatacatactcttagaaaagagaagaaaacctgggagagaatacagaatatcatcaataacgaatttaacacccattacacgttaagcggtgttcataccctttactacactcaagcattaaaaacgcgtagaacaggagaaatctag

SEQ ID NO: 686 - DNA, 504 bp, Goslarvirus sp.
  source 1..504: mol_type = genomic DNA
gtgaaacccccagtacgacgatggaatcgtaagtacgatgagcagttgctgaaactatacgatcgtcgcccgaaattaaaaatccgtgaaatcgcggaaatcatggaaacgacgtacggtgcaatcgaatcaaggttgaggtacttaaacgtcgaacgccgtaaaccgcataaacgtttcagcgtcgatgaattagaacatatcagactacactgtaagcacaaaagttacaaacagctcgcacgcgatttaaacagagatccaaacagtattcgaacaatagcacaccgccatggcttcaagcggttaagcgaggatgatactaagatcttcatagccttcgttgatgcattgttagaagaaacgcaggattggtaccacattgctgaacgggttaatgcgcattttggcataacacggacgaagcaagctgtttatcagcgttggtggcatcatagaaagaaaagagggatacaagatgggacgacctcggccgtggcgtaa

SEQ ID NO: 687 - DNA, 504 bp, Goslarvirus sp.
  source 1..504: mol_type = genomic DNA
atgggacgacctcggccgtggcgtaacgatgagttaaaagatgttacacacatgtacttgaacacgccgctgacgattgatgaaatcgcacaacggacaggacgaacatacgccagcatcgacgcgtgtctggggcgtttgggaatacgtcaacgccagaagcatcgaccgtatacggaagaagaacgtgcgtacatcaagtccgtaatcaaacaaaaatcgctgagggagattgcgtatgatttaaaccgttcgtatgactcggttcgtcagtttatacggcttaatggaattcgtcgtgcgttaaccaagcaagaacgggaagcgattatcgcgtttatcgcggaacgacttaacgtcacccaaaattggaatattatcacatacgacgttgttgttaaatttgggattacaacgaataaacatgcgttgtatcaacgttggtgttattacacgaaaaacaaaggagttgcccatgcgcaaataccgccgctggacagatga

SEQ ID NO: 688 - DNA, 531 bp, Goslarvirus sp.
  source 1..531: mol_type = genomic DNA
atgcgcaaataccgccgctggacagatgaggaactctcacgcctcgagaattacgcgtatcaaatacctagaccatcgattagtgaactggttaccgtgtttcaacgcacagaaagcgcgattaagaataagttatacgtattgttcccttcgccgagaaccaacgcgacgtatacagacaacgagctttcctatattcgcgataatatccatagatactcgattaaacgaatgtcgaatcatcttggtcgctcgaaagcgagcgtcgcctccgtaatacgacgtcataaactgcgacgatacgatcctggtgaatggtgcaaaatttcagaccgtatcacgacacttcgacatgaaggggttagctggagagaagttgctcgcattatcaatgtcgagttcaaacgggagtaccatcacacacatctttgtcaacgttactattataacacgcgtggtaagaaatggcggcaggtaaagaatacacaacaaccgaaatcgcattcatacgtcgaaacgctggcgtcatga

SEQ ID NO: 689 - DNA, 507 bp, Goslarvirus sp.
  source 1..507: mol_type = genomic DNA
atggcggcaggtaaagaatacacaacaaccgaaatcgcattcatacgtcgaaacgctggcgtcatgacatcgaaagagatcggtgaggcgttagggcggagtcagagagcaattagcgcgattgcttcaatgcttaacattaaactgagtcatcgtaatcggaacgatatcttatcgcgggttgtccatttacgtgacggcgagaagcgccgatggcgggagatcattactatcattcaggatgagttcggcattacgtattctgaatcggggttgcagcgcggataccaacgcgtgaagctcgtaacaataaagaataccgatcctacgcgtcttcggatgttgaatgaaatccatcgttatcggcaatatgataaactttcatggaaagaggtgcaaaaacgtatcgaattacgttataacaaactttatcaaatcacaacactttgtcaaatgtaccgacgtcaccgtaatcgactgttaggtaatgagggaattttagcatga

SEQ ID NO: 690 - DNA, 534 bp, Goslarvirus sp.
  source 1..534: mol_type = genomic DNA
atgagcatcaaaacagtagttattaatgaacggccgttctattgcgttatcgcctcaacggctgccgatccacacctttacccacataaacgacagattcgtgagctgtaccgtattctcgatgatgtagaatcagaggcatgggcaaccacgtttatgtttgagaatatccccgatttaaaacgcgagtacgatgccttagaattagagaagcgtttaccggacaccgcaaagttggtcgttatgatcgacaccatcgcttcgataccggtaggcctcttggaagtgaatacagagagccatatgggcattcatgatgttacatcgattgttgtaaaaccggaataccgtggacgcgggatcggccacgccttgatgaacgaagcacgtaacatcgcttaccgatgtggcgggcattctatcggcctggatgttcgtgctgataacgacgaagcccaggcgttctacgagtccgagggtttcacggtaagatcatcgtggttaacatcatcaatcaaacagaaaggagcttaa

SEQ ID NO: 691 - DNA, 429 bp, Goslarvirus sp.
  source 1..429: mol_type = genomic DNA
atgagctggttcgatcgtaaattcttcacgttggaagaagtcttagacctaccttgcgacgcgaataaggaaaatatcgccgacatgcaacgagcagcattaactcgcatcattggtgatgttgcgcaattttctatcggtgatcgggttgagcttccgttcggaaccggagaagaaggagataacacagcggttaaattcgttcccgccgttgtcgtcggtgtccatttcacggcatcacaagtcagttatgatcttgcgatacctatcgacggttgcgacttgtttatggtcttcaataacttccgtggtgacatgcgcacgatagacggaagcaatgcgaccgatttcatcgagaaacgcgttgctgaggcgttggtcaagaaaacactcggtacgccgaatcttaaagttattgaaaatgaataa

SEQ ID NO: 692 - DNA, 651 bp, Goslarvirus sp.
  source 1..651: mol_type = genomic DNA
atgaacaacgttattgcattactcacgcaaggcgaaaccagaatgccattgccgtaccagcagcttgctagtatcatagaacccatgacgtaccatcaacaatggagtgtgcgtgaagaatgtacccagcacattggatggtcgttgttaaccatggataccgcgctccagttagcgaatatctgttacgggcgacgtgtcgctgatttgggttgtgggacaggttacctgacttatgtactacgtaaacttggtgttgaggacgttaccgcctacgatacggaattacatccccacccgtttatcgaggacattcagcaggtcgactacacgaacatcgatctttcacagtacgatgttattttactgtcgtggccgccttactgcgaaccacaagctgcgctggttgccgcgcgtattcaaccacatcagcttttgatctatcagggtgagggatacgggggctgcaccggagatgacgccttccattcgatgcttcgttcggatttctcctctgtggaagaattcaccgttaacttaaatgcacgtcatttgaactttcacggcatatacgattcgtggacggtttatcgcaagcaatcagaatttacaaaacaaagggatgatttggaagatactcgtcatgaataa

SEQ ID NO: 693 - DNA, 726 bp, Goslarvirus sp.
  source 1..726: mol_type = genomic DNA
atgatttggaagatactcgtcatgaataaaggaaaagaaatggaggaccgttttatgttaatcgtaactagtagacaggaagtatccgattggcttaatgtccatcttaacgctaacgcctccccagggggcgttgtaatcaatcccgtttatgacgggctgccgttcaccgcacgttacgagcgtggtaagctgaccgcaacgaaggttaacgacgtctcattaaatccggaacatgctttacgtgtatttcgtattccgttgacgatcaattatcgcggtttagcaaaagtgatggtcgtttctggcacggtatgtaaatacgctgaagcatctatcgatgattttcataatggggtaagacactttagtgcggttgccgtaggttatcctgaagctgatcgggttgaggttatcgaacagggatctactgctgttccgtctgacgtgtttaaactgcgttgtttgttcgagacttggcggttagccagcttcaaacagtcacgtatcgttcctcatcgaacggtatcggatgcactacggcagcttgacgtgatcgtagcgacgttaaaccggacgaaaggtatttctgcgttgttgttctcgttgaacactccagacgaccgttcgcgaacgcagaatccagactgtgtgttcttaaccccggaaggagttatccatggtttaccgaagaagtctctggaagataagatggcaacgtcttaa

SEQ ID NO: 694 - DNA, 600 bp, Goslarvirus sp.
  source 1..600: mol_type = genomic DNA
atgacagtggtgagtattactgagccgcggtttatccgcgaagttatcgaccgtcgccgttcggtgatcgttgcttacggacgaatggaaagtaccgcacctcaagaactttgcgtgttattccaggggtgtttcatacaccgacaggaaggacataagggtaaaatcgtccctagtgatttgattaaagcgatgcgtaagattgatgttgaacaacgcaagctgaatctatcgcatcgcctgcctcccctcgatgagaccgaagccaaagacttcgctgatcgggttatgaagtcagccatcgttcagtacttcggaaacatgccaagcaaacgtaataaagcattacgtgttgaatccgatcagctgcttcattggaattcgaaagcgttccgattcgaagaggtgttcttacccacattcggtaaacggctggcgtgggacttctcaacagggtatgtttacacgggcgacatcccgccagaaatacagcataaaaaagggaaatcactagaagagcaaacagaagccgcggtcagcgaacaggtctatcagcgcctgacattctggttgtttggaccaacactggaacataagtaa

SEQ ID NO: 695 - DNA, 414 bp, Goslarvirus sp.
  source 1..414: mol_type = genomic DNA
atgattcgtgtcatgttggctaatggagaattacgccgttactctttcatgcaagcgataaagtatctcattgttagaggagaacaggtttatttcgatagcgcacgttatcactacgatcactccgattgccgcgtaactggtttcttaatcaagcgtaggcgtttgtctaagctacagcagcatctcatttatttacatcgaacacgtgtgttctgttcgtcaacggtacttccgtatccgatcgaaagtaatagcgttaaactcgccgtgttgcaagcgttagatcgtttacctaaaccagtatcgtggcctatcgagtattacgaatcagaggagaaccgaatacattcatacagtcctttatttggtaccccatacatccaattatttaaacgcaattcattaggttag

SEQ ID NO: 696 - DNA, 447 bp, Goslarvirus sp.
  source 1..447: mol_type = genomic DNA
atgcaaattacaaaagcagaacgtatcgaacttttcaaaaccacaaaaaccaacgaacagaatcgaatcgctaacaacactcgcctggttgctcgaatgttgcgtgcgggctatgagcaggcctctcgatttaccagccgtttaaagcagactggcattgcttattacgatgaggataaaaatattctgatttacactggatggatcgaaaaccattgttggtgcgatcatgggcatgcgataatgcacttgactccgggcggtaacgtcagcgtaacgtttacactaacaccgttgatggtgcgtcgtgcattccgtatggataacttcatggagttgcaggcgtatgttccgatagccgccaaaatggtattaccgacgatccatgactgtacggatattgtattcaatggaaaagacctatccatcacgtactatttggattaa

SEQ ID NO: 697 - DNA, 1026 bp, Goslarvirus sp.
  source 1..1026: mol_type = genomic DNA
atgactgtacggatattgtattcaatggaaaagacctatccatcacgtactatttggattaaggaaaagattatggttaagctatcacctagatacttcaccttcgtttgcggaaataaaccgaaattcagttacagtgatgatatccatcgcatgctacgtaatcgcgtagcaaaagtgttgattgcactcatttcggagcgttacgggtttggccctgattaccctaaagaaggaggtcgtctagttgctcctctaccaccagacgaccatccgttacgtctgttattggataaggtgattcttccactgtttactgaacagacaccactaacaaaaagtttgtgtcggcacttgctctatgattacagtgcgttatgggagccgttacgtacgatgcaaccaccgtgtaatttgggggtatttgacaagtatgagatatcagccattgttaatctattttgttgcgaacacactttaggttggcatgttatcgacgaacttacgataagttgggaggtgagtaacgttacagattacgatatagaccgcaaacaaatctgtctctgggagtataccggcccaacgattcaagaactgctcgatatgcccaatctcttctacacgggagtgattatgggttaccggccaggggataaggacttctacctcgaaaatcatcgatggttaacacgacacggacacactttaacatacccaatccttgaagaaatgggtaataatgtttggcgtatacgtaatttagccattcttcctgataacgagcattttgcgaaaatacttgctgataaaggaggcacggaagatatttacagcgtgtgttttgatttaggcatcgcctgtatctttcgtatcgctgacgtcggagggagtccacgcatcgagaaggttgaacgctatcgttggacagaaggtgcagcaccgcctgatgaaatcatcaaactttttcctgaagttgtggttaaacgcttccatgcgattcaaccctacatggcgaagtcgtga

SEQ ID NO: 698 - DNA, 318 bp, Goslarvirus sp.
  source 1..318: mol_type = genomic DNA
atgtgtatgtttaaaatgtctgtattcgctattcgcaataatcgcgatatcttaggtcatttggaagccgacgctgaaggaacattgattcgtttcatgcgtcgtgttaaagaagcctttgaaaatcgtgaacacctcgtggaagttgttgaggatcttccaccgaactcaatgcgttttgtcgctatcgacggatccgcaaccgacatccgtttcatcaccgttaacgactcaaagatgatgttttctggtgataatacggttacaggactgtttccaattgtaacggttctaggtcatttcttacgtgcaaactaa

SEQ ID NO: 699 - DNA, 423 bp, Goslarvirus sp.
  source 1..423: mol_type = genomic DNA
atgaaactgttcaaaaatatcgtattcgctatcgtcaccaccctggcttttgttagcacgcaagcacaggctaactggatggctcgtgggaataactgctacgcctacagtgaagatggtcgttatcagattggtatctcagatcgttcgcttgttgtcatgggtcaatttcaatgccgtgcgcactatccgatgtctgataccgtaggaatcaatggacgtgtataccaggcattgaatatctgcagtccggacatgcgcttgatcccagttattagccttgcgaatacagatcaagctgctaacgcaatcgccagccttaaagaagcacgtcgtgcgcgtattcgtgcgtttaacgaaaccatcatcgtaaataccgatgatattcaggcatgcgctaacagtgtagcggccgtacgttaa

SEQ ID NO: 700 - DNA, 351 bp, Goslarvirus sp.
  source 1..351: mol_type = genomic DNA
atgaaaacgttaactaaattgtttgttgctgttgctattctgttcggtagtgttgtcggttcagcgcaggctggattgttggatagcccggaagtttacgataaagcaaaagcggtctacatggccatggagagcatgacgccagcagaccttgaagaatatggagtcgacttcggattaccgaaagaacttccaggagttaagaaccctatcaatcccagcgtgaaattgaaagtggccgacttcgaagttttcaatccctctttcaagacctacgcacgggttcgcgtactggttgatccaacaaccggcgttgttcagggcgctgaatatctctatctgggtaaataa

SEQ ID NO: 701 - DNA, 210 bp, Goslarvirus sp.
  source 1..210: mol_type = genomic DNA
atgattccagctaaccctcttttaagtctcaatcctttccacagcaatcctggtgtcgatcagatacaacctgcttttttatcacagttccgggctgattatgatggcgacaccgtaactggaaacagtatccgtctgttgaatcgccgcaagaaaggtccaggcaaaggcaaagtaaaaatcattcaacgattgatctcttatgtataa

SEQ ID NO: 702 - DNA, 171 bp, Goslarvirus sp.
  source 1..171: mol_type = genomic DNA
atgtataaaccaacactgttcgataagtgccgcctgcatatgggcggcatcgctctggtctttatgttgtacaacagttgtcaaggaggtatgtgggtacgtgcgttattactcgcattcgcgttagtgatgtttctaaaatttgaatcatcgctttatcagaaaaagtaa

SEQ ID NO: 703 - DNA, 192 bp, Goslarvirus sp.
  source 1..192: mol_type = genomic DNA
atgggacatatgctactacggggattaacggggatggttctagcatggatggtcattgggttttgtgggatgatgttcttcatggtcgatgaacctgctgcccgaattaacgtagggttatggttcgtcttcttgatgatagcggtattcgttatcgttaccttgttgaggaatgtaggaaaacacaaataa

SEQ ID NO: 704 - DNA, 372 bp, Goslarvirus sp.
  source 1..372: mol_type = genomic DNA
atgagtttaaagacatacgcaaaaatctatttcattttcacttttataatgattgggatttctgcaacgaatatcgattttgaaacaacgacggaacgcgtttattacgttatccgaaccatcgtttgtgttatagggcagcttccccttttgtatatttgtacatggtcgacgcgtaacataaaacggtttgtcgtgtatgggttcgcgtacgttcttttcatgcttgttatgtggcaagccgatgctcgattgagtgatatcgcaaatatcgtcgcaacggcggtcctcagtgcaacaagctggtgtttatttttaccgatgtgtcgacgtgtcgaggatgaaggttatgggtatcacggagaatcttaa

SEQ ID NO: 705 - DNA, 321 bp, Goslarvirus sp.
  source 1..321: mol_type = genomic DNA
atgaaggttatgggtatcacggagaatcttaagttaactaatcgcatccttgtcgatagagaagttgttttacgcgagatacgaagcgtgatggcgatctttaatctggatcatcgatccgccattatgtctattctcttgaataaaacaacctttaatatccgggagatacgtcgtattcacaacggtatggagcgacggcataaattaagcgacgaactcgtacattgcaagtttataccgcatcaagtctatcgacgtatttatcgtgagccgtatgttcgggataaatacaacctatggctcgacggtagaggttaa

SEQ ID NO: 706 - DNA, 168 bp, Goslarvirus sp.
  source 1..168: mol_type = genomic DNA
atgacttcaaacgatgtacacctttaccgcgttggatgcgggaaatgggttctgttatccaacgttatgtttattgccaaaccagaggagaccgtattttcagtaccgtttatttctgtcgtggatgtcgggcaaacatctgacgctaacctgctgcccgctgaatag

SEQ ID NO: 707 - DNA, 498 bp, Goslarvirus sp.
  source 1..498: mol_type = genomic DNA
atgcaaggtattttacacacgttgattttagggcttgttatgttgcttatcacaccgttcagtcaagcatcggtgaacgcaggacctagaatcgattgccggaaagagatcgtcgcatgcgctgtgtatatggaagccagaggcgaatctgtaaaagggcaatactccgtggcgtttttaatacataatcgatctatggactaccgattccctacgaacgtcagagacgtcgtactgcaaagaggtcaattcccctggacaaaacaaaggcgtattgtcatacgcgatcatgctgcttttgagcgagcaagagcaatagcacgagaggtcgcaacattacgttatactgacattgcggcttaccataaagccgacccaacacgaggagccgtattctttaacgcgaaacatcttcgccctaaacatttcagaaaacatgctaccaatatcaccgtggtagatagccacatcttctttggtaaacgacgacacacgtaa

SEQ ID NO: 708 - DNA, 105 bp, Goslarvirus sp.
  source 1..105: mol_type = genomic DNA
atgcccttcctgcgtaaggtgggaagggcttatgctgttaaactgactaaatgtaatcatcctaataaagaaggaaatcatcatgaaaacgatcaaagcaactaa

SEQ ID NO: 709 - DNA, 249 bp, Goslarvirus sp.
  source 1..249: mol_type = genomic DNA
atgaaaacgatcaaagcaactaaatccgttaaaaccaaagttcaaccgctgcaccacatcacggtttatcgtaacaaagataacgcaatcaccaagttccgcgtccgtgtaaaagcggctgaatccgcattaaaggaattggttgatacgactgtttctgtcgatgcctacgattcgtaccagaaagcaatgctggcggcgattcaaatccgtgataaagcgttgaacagtccaatcaatgcattttaa

SEQ ID NO: 710 - DNA, 750 bp, Goslarvirus sp.
  source 1..750: mol_type = genomic DNA
atgcaagaagcacgttatcaaggaagcatcatgctttcctgtggttttgttatcgaacacccactgctcggtaaattgtttatcaaagaagaaatacgtaaaccaggacaatcgaagaacttttcaccgcttttagccgctaaagccttattagaatcgttcgaggatattaacgtcgtcacttatcacacaacgttatatcaagctgatgggtacagatggttcgatggatggattcgtgtccatcatgatcagatcgaggtcatggtgggaaacctagacgctcttccgtttacccgtcttgatatcgatactgttgaaatcgattatagtaacatagcgactaaactcccagacgatgagttgatccaagacgtacgtcgtttctggtcgaactatcaagataacattttgattccggtgcctgacgaactctctaaagtttatgatgaactggttagcgagaagggggacgtatggcgcacgtgcgaagatccctatcgcttctttacacgtaaacaaaaagaacgtttgatggtacgcggctggattgagaatcctctcggtgatgtttaccattacgttgatgcggaagctgtggtgagtgacgaacgacataaatttgatattcgggatgaacagttaatatggacagcacagcgttcagtagagcaagatgatgtgattaccatgttctatgatcctgaaatcaaattgactctgtttgtggaaggagatattgacgaatga

SEQ ID NO: 711 - DNA, 576 bp, Goslarvirus sp.
  source 1..576: mol_type = genomic DNA
atgaattggattaaggtagtgttgtttattatacttgttgctgtatctatcggactattcttttacacacgtcggaaagaacagaaacgtaaaccgagcagaccgttggttaccggtgttgtaacacccgcaaaacagtctgaattacctaaatctctttatatgacggaagtgactttagacgcatcaaaaggcaatgagcttgtgctcgaaatgttaatgcagaaacattataaagatgctgtattgactgccgagtattgggttgatcctaacagtccgggcaaacgctggcgcgcatggtatcctttacatgtaccatgcacaaacacctggattgagtggcctgcattggttagctatcgttcaaccgataaagcaaacaaagcagcgttcttcttggataccaatcgtttcaaatggtatcccgataaggtaacgaatgagccggtatgggtgcctaagaagggcggtacgtgctttactgtcggacaagtcctgttaacagatttagacgaccagaacaacttctttgtcattgaagaagaaaagcttaacgatctgattcctcattaa

SEQ ID NO: 712 - DNA, 831 bp, Goslarvirus sp.
  source 1..831: mol_type = genomic DNA
atgtatcctgaagcatcatggcaggaggaagtgttatctaaaataaacgcctatctccagcacccgttgtctctgtcagacgttacgttaacgccagcctggtatggtgcatcaggtcggttacgcctttctatagtccccgcaccacaatcggcttactatatcgaagaccccgtacaggtttatcttcaacgtcgagacattaataagctctttatcaaacaccaaccttttattgtcgttgctgataagacgacgatagcagactgcttaacgcagctgtttaagaagtatgggttgaagatcgatttaacgatctttgattcttcagcgttagtgtcgcaggttaaatttgaaagcgacgagaaaaccatagctgttcccgttcattctgatacatcagcatcgtggtacggtacgtttcaattcctcgcccgaaaagcggtaagtaccgatattagcgaactgattacggtgcgagaaccgctaacctcgtattatccagaagatagtaaacaaggggatttccacacattcagcacctacggcatcaagctaaatttaccgccgcaagatgcgatacgtacgatgtcggttggagatactccagaaggatacaatgcattccgtttagcctcgtcgctgatttcaatgagttataccttagcctgggaactcatcacaacagccaatgtcgtttataatggaaaagttgccgatgcgaacgatttagatgttccaatacttccgtcgttcggaagctctgttctggtgttaaaacctcattccgatagcggcgtcagcagcaaactttattttagttacgattaa

SEQ ID NO: 713 - DNA, 3597 bp, Goslarvirus sp.
  source 1..3597: mol_type = genomic DNA
atggcgacattcttacctgacgataagcaggatctggttgaccaactcaatgtactaaataaaacaaatatcccggctgatggtatcgcagtcactgctgttggcgatagtcaaaaacttgacggtgttggaaattacacagggacggttacggttaataaaccaaaacggtcattcgcgacactgtttccgttcggcgcgatcgtgaaaaaagaaaccggtaacgaggatgttactggccgcgccgcactcgcgttattgaacgagcagttccatctgacgattgcagaaagttatttcacagaagaatctttaaatgcgacataccagttagggacatggaacagcatctccgcacaaatcgctttagaaccaaccaaggataacccttactggaaagatacgttgttcatctcaatgtatcggtcaacgctaggtgctttgggggcatatagtgcaagcgcatcatcgagtatttatgttgatttaggatcggctagaaaagcgttcgatctgaatcgtactggcgtatacaagttacctttaccaacaacgtccagtagtgtaccggaccgttatgaatggtgtcagttattagagattaccccatcggtggttggcggacagattgactggagcaactacttaacgctggagccgttaacgccgacgttcccagtgatggaaatcgatacaacttattacttcctgctttggacatttaaccataaagactggtacgtgaaacaaatcaccgcatccgagcgttataatgatgttgctcaacttatcggtaaatggatgattacagcgtcgccggttaatttcgttggttatggccatgcaagattcttaacccgaaacacaggaacgtttaccgacccagaaaccgatcattacgtgttaaatgaaagcggggtcatggtaaacaaccgtcatttcattgcagcaacacgacaagaagcacaaccggatggtgacgcaacaacagaaggacagtcgttgttaattctgggtgcgggtatattcagtcatacaacggatgataccaagcttaaagcgcactatctcacattagcagaggcatcgttcgatgcgtatataaaagcgttctatgcaggccttgaaccaccggatataccggcacgctggatcgctaactggattgttaatggtaaacaacctgtgttggcccattatcctcttgcaaaagacgattacccaacacatggcggtttccatgacacagcggttacattcaccaacggtatcgggaaaataacacatggggcaccaacgttcggggaatacatggatcttgttgttcaggtctatgaaggtaaactcggctggcagaatttgaacgcggatgtgttcaaaaccaatgatgatgggacgattgactgggatacaaagggtacggtgttccctatcgagaaagttgcgttacgcacaaaacgttacgtaagtgctgacggggacgatcttgaagcgtgtactgacgatgaagtaggtactatcgtactcaaagataaatccgtcaacggttcttacttggttgcatgggcaccgcgtgttcctgttgaatatggcggatacctcatcaaaacgaacgagtgtcagcataaccgaccgatccaggtaccagtcaccagagactacatgggaaacgcgtcagacgctgaacagtggttttgtgaagcagcctacaccttataccgtttaacgcagcaggagcgttatcagaaagcgtacaaggcgtctttgtttacgattgaagaatatacccgtattgacgctaacgataagttcttccgtcaagtaaaaggaaccgatcgttacgacaccgacggtatcgcttacacgtatacatacccgtcgaaagcgccgttcacaatcacgcgtgataccgatggttggatcgtgattcaagcatcttcagcacaaatttaccttgaacagcaggccattccgttccgcgtcaatcgtgattcaattcttcgggtaacctgcggcggtaaagatacgacaggcgttgcaattccggttgagatctcattatcgctttctttggacaaaaccgaagcgaaagccaaaacgtacaagctggtattaccttccagcgttgaaccgaaaggatgggatttcaaaataggctcgttgattcccgctgatgcggttgatgaagcttcaataccaaccggtgatgctgttacaggttcggtgttgatgtcggctgataaagtcggctggaaagacgatatcgcaatcacaacagaattcagcgaagcagtggaagattcctgggatgggttgttcctaaaagcgcagcttactgcggcaggcggacaatttgaattcaatccaaccgcaaaacagatcgtaaggcaggtcagttatttcgcgtcgattgactacaacgttcgtgtagaagatgcaaatggttggcgatggtggtatatgctaccggccaccacagcaagaaatacattgacgctttcggcgaacggatggaggctctcagggtatcaacctggccatgctgatactgaccctaaaccttccgcacctgtgtggggcgacggttcaactgaaattctgttcttgcctgatgacagcgatatcgctgaaggggtatttaagctttacgccatcaacaatccaccgtcaacttacaccacggatgacggatataccatgctgtttacgttaaaagcaatctttgaggcagagggcacattgcgtgttggcgattgtacgattgtcaaccaacgtctggatccattgccttatactccgggtattattccgttctcgaacaactatatccctaacgcaccgacgttcgacagctggcgtggtcagccttatcccggctaccaacatccatgggtcttcctggatatggacgtatcggctgaacgacgtgacctcatgattcagaatgttgtgaatttctggtatgactcgcagcagtggtattatcagaaattcggggttttagggccaggagcaagtgcgtacgtgtgggatcgttgggatgcgccaagcggatcgaaagttaatgattttacgatgtaccacttcggcgatcagacagcatggtctggttatcagccgagggctttcttttcagcggtgaggctttatgccggactgcttgatcgtggtttggctgtccctgagaagttaaccacttacatcagccattggatcgatttcttgtttacgtatcaacaggaaaacgcttatcaatctcctacggattttccgatggataaaccccctgcttttatccctaatgactttactggtcatatggcaggattatggttagcgggtgcgtcgttagcgatgttgtatgggcatcccaacgataaaggctatcctgttgccgttaacgtttataatgaaatcgttgaaaactacatcaaccgctacaccgttgatgacgcaatgaatggtgggtggagtcctgcaccagatagtgctaatctcggcagagacggaatgtattttggtttctggagtggggagatcctccgaggattaggctattatattgccctattacgcgacgtgaaaccgacaatttaa

SEQ ID NO: 714 - DNA, 1770 bp, Goslarvirus sp.
  source 1..1770: mol_type = genomic DNA
atgattggagtgcttatgtctactgtttatcctggatggaaagccgatcttctggcgctggtaaaccggaagaacatgctttcgttgaaggaatccgatgttaaatttgaatcgttcatcccagctgaacatcctgaaatgtgtcaggtaaccatcaaacctggagataacagtccctatttcttcgaacaatcacttacgtatgttcgtcgagatattgctaatgcgttcacaggaatccctttacgattcatcgtaagtaccgatgttgctttcaggaacatcatagattccatcgctgaaaagtacggtataaatttcgacctcgcggttgatttcctggaagccgatcttaataagaagatcagttttgaaacatcgggtattcagtcggtcgaattaccgattgctgaaagcagctatgtttggtctggacatttacaagtacaggtcattaacgatacgctggatctgattacaatcattcaagcgtaccagattacgggactgcattacctccaagaaacagacaccaccaatggatcattagtgcttgcaactgccgccgcattggatgatctcgctgttccatcagttgatatgtctgtaggacaccaattacccatcgaatacttcgaaagaatgttaagtgctttagtggaagctggtgaaattaccgacgatgataaggctcaagcattaaccacattacagactgacgagaaccgtacggttcttttcctacaacgtggcacagcacatatcgcggtaactcaaaaggatgattggcaaattggtaacctgtacggtgcgatgattgtttgttattataccgacaatgcaggtaaatacgtcctgaagaccaatggcgggaccgttaccctagatcttgatggttggatagatatttccattgattggggcgatgggaatagggatgtaataggtgagtggcctacacaggctgaatatacgtatgctgatacaaacgaatatacaataactgcaacagggtctgtgtataatggtaacggacgccaaacgatccgtgggtccaacattacagaaatcgtaaattgggataacggtatgttccgctctccgtcaaccagttaccttttatcactccgtaccgtaccaaaccgtatcccagagaaatggacgtcgttagacgaattgttcaaattcttatctatacttaatgatcctaacattcaagaatgggatgttagtcgtatcaccagtatgtatcaaaccttctccggatgcacaaacctcaacctcgactttagcaaatggaatgtgagccaggttaccgatatgagctcgatgttccaagattgtcgcaagttcgttggtaacgggttagataaatgggatgtatccaaagttaacgacatgagttacatgttcagtagctgctatgcacttgatggggacaagctggttaactggaaaacaggtagtcttgtcaacgctagcagtatgttctcgaacatgcggttcaatagcgatataagcggctggaacacttcaaaattacaagacgttgttaacatgtttgcttacaacgcggcattcaaccaagacatttccggctggaatacccaatcgttacgtaggatcgacctcatgatgcgcaacaacaccgcatttaaccaggatcttagtggttgggacgtaagtaatgtaacttctggtaaggacaacgttggacagggcgcaacaaactggccaagagaacgttggcctgggtatgtagcggcataa

SEQ ID NO: 715 - DNA, 96 bp, Goslarvirus sp.
  source 1..96: mol_type = genomic DNA
ttggcctgggtatgtagcggcataaagtgttatcctcccctacctcgacgaagcgagggggggggtaatatgcgcggaattttatgcggtcgttaa

SEQ ID NO: 716 - DNA, 528 bp, Goslarvirus sp.
  source 1..528: mol_type = genomic DNA
atgcgttcactttacctgccgtggaaagacgaactgattacgttgataaaccaacgtaacggtagcgtgttcagcaactccgatctcactttaaccctggataggagttctggtgctaacagggcaaaagtgatcgtcacagcaaatgaaggaacaaggtggtgtggtgaaagttttatcacttacacacgacgtgatatcgcgaaagcgtttctagggataccgatgaaaatcgttttggagtcggttgaaacaacaactataagagcggttattcaagctatttcagatcagtacggattcatctttgaaaccgatgctgattttgattcagctatccttgctactgtcattgattttcgtgacgacacatccaagaagatctcgattcccatcgcgaatacctccatggtttggcgtgggcaattggatcttatcgtgacaaaccagcgtgatacatcaccagcgtatctttgcgccggtgcggcaactgtcatcggtgatgtcatcactatttacccgggataa

SEQ ID NO: 717 - DNA, 3525 bp, Goslarvirus sp.
  source 1..3525: mol_type = genomic DNA
atgagtacaacttataaaacggtcattaccgataaaggcgctgaacgtattgccgcagcgctacttcctgacggtgagaaactaagaatcacacattttgctgttggtgacggaaacggctctacaccaacccccgatgttagccaaacagcgctcgtacacgaagtttatcgtggggaagtttctaacatccacattgatgttgacgacacaacccggattgttgttgaaggcattattcccgccagtcaaggtgggttctgggtgcgtgagatcggtctgtacgacgatcagggtgaacttgtcgttgtcggcaatgcgccagaagggtacaaaccactgccttccgaaggggcaggacgtgtgttaaattgtcaggtatttgttgtcgtaagcaataccgatgcgatcgaattgaaggttgttagtgacgcattcttaccagatgcgaccaccgagaaacggggattaacgatccttagcagcgaaacaaatagtgacgacgaaaccaaagccgcaacatcaaaagcagttaaagctgtgatggatgttgcgaaaggaaagtacacagcagtggacgctagtaccacacgtaaagggttagttcagttaacctcggcgacgaacagtgatagtgaagtactcgcactatccgcgaaagccgggaaagtcctagcaacacaaattagcgctaaagcggatctttctagcccggcatttaccgataagccgacaacaccaaccgcagccgaaggcgataaaagtcagcagattgcgaataccgaatttgtgatgcgtgctatcgcagcgcttgtcggatcgtctcctgaagcgttggacacactcaatgaattggcgcaagcgttaggtaacgatcctaacttcgcgacaactgtaacaaacgctttagctggcaaacaaccgctgaacgctttgctcacagccctttctggactaacaacatcagcgaataaattaccgtatttcacaggtgctgataaagtagcgcttgcaacgatcacttctaccgcacgcgctctcttacagcagtccggtgttgaagggatgcaaacgatattgggaattaacgcctcgtcgttccgtcgtttcagaggacaactcccaaccgatgcaaacctgaatacctacggtccggttgaagcgtctgtgggtatttggtccaaacaaacatcaacgaatgccgatgctgcccacaatttccctgaagcaaatgctgtaggttacatcgaagtgctcccagccggtcaattcggtggaacacaacgttacacagtacgtacaggaaacatatacgtgcgcagtttaacggcatcatggaacggtgtggatggtccatggggagaatggttaaaagtcggtaacgtcgctgctacagccgctaaacttgctactgcaagaacgataggtggcgtcagcttcgatggttctgctaacatcgatcttcctggtgtaaataaagccggtacgcaaaataccagcggtaatgctgctacagcaaccaagctacaaaccgcccgtaaaatcggaggtgtcgcgttcgatggcacagctgatatcgcattacctggcgtcaatgcagctggtaatcagaatacgacgggtaacgctgcgacagccacgaagttgcgaacagctattacgatcggtggagtttcttttgatggttctgctagcattaacctaccaggtgtcaacgcggcgggtaatcaaagcacttccggaaacgctggttcagcaacaaaacttcagacggcgagaaccatagggggcgtgtcctttgatggaaccgccaacattgatttaccaggtgtgaacaaagcaggcaatcagagtacctctggtaatgcggctactgccacgaaactccaaacagcacggaagattaatggggtcgcctttgatggtacaactgatattagctttagcattaacgcgctcgcttccaagggacgagtcaccgctttagctaatgcgacccagggcagcaatacgggcatccagatgtatgaagcgtacaataacggataccctacagcctacggtaacgttgttcatcttaaaggagcaaccgcagtaggtgaaggtgagatccttattggatggtcaggtacttcaggcgcacacgctccagcttacctacgttcgcgtcgtgatgcatcagatgcgaactggtcggaatgggcacagatctacacatctaaggatagtatcccaggtgtgaatacaacaggtaaccaaaacaccacggggaatgcggcatccgcaacgaagttgcaaacggcacggacgattggtggtgtttcatttaacggaacggccaatatcaacctacctggggtaaacaccaccggtaaccaagacacgaccggtaatgccgccacggcgacaaaactgaaaaccgcccgcaccattggtggggtgtctttcgacggtagtgcgaatatcaatctgccgggtgttaacgccgcagggaaccagaacacatcagggaacgcagcaacggcgacgaaactgcagactgcgcgtactatcagtggcgtagccttcgacggatcgcagaacatcacgttaacagcgaaaaacgttggcgcaaccgcatgcccgaccggctggttgatcaccggtgataataacagctcgattacgacctcatcgtttatcacgttgttgcaaaaccaaggtgcattcaatacccgcgcctgggtcgcacgttgctccttcgcagctgccgacagcgcatacatcccagacagtgaaaccaaatgtggtattattcctctggctggtgcggttatcgaggtcgttagcttcgggatgacgaactacactatccgtgttaccaccgcaaccacgtcttccgtcagtggtgcgaaaaccaactccgagttcatttatagctacgacaactataatggcagcaccaacagcccaggatggcgtcgttgttataacagcaagaactactccgttaacttatccgattttgtcaccgaaaaccagttaaccggttacaacaataacctggatattattgccaatacgttggtcgtgagaaatgggagtaacggcggatttgcggtatgggacattagcactacaaccagcggggctaatatgtatatcagtcctactgctgggatcaacaatgtgtttcgttcaacgtcgtcgcggcgctataagaaagatatcgagaatatcacggatgaacaagcggataaagtattggagatgcgtcctgtctggtatcgttctacctgcgaagccgacaacaaggattggggttggtatgggttgattgccgaagaggttggtgagatcgcaccacaatacgtgcattggcgtgatgcaaccgaagaagatgaccccgctatcgtttcttctaacggactcgtcgccgaaggtgttatgtacgaacgtttggtggttccattaatcaaacaagtacagaagcttacggcaaaagtggaagcgatggaagaagaacttaaagcgctcaaaaagtaa

SEQ ID NO: 718 - DNA, 507 bp, Goslarvirus sp.
  source 1..507: mol_type = genomic DNA
atgatgaagaaactttgtgcgatcgttcttggtatgttgatggtgctttctctgggtgggtgtgctacgctggaaggtttaccgaacctggataaagacctgacgcaactggtgggtttgaaaccagtcgagaagaacagcaatctcgctgtgtattcttgctggggtgcaacccaggaattcgaacattggaaaccgaagttctcaaccactgaaatctggaacgataaagttctggttgtggacgaaggtagtcaatttaccgttgactctccggtaaccgttttcgagtccacccagttgtataccacggtgaaagactacgttgacctggggttcaataccgcaaccagcgaacgcttctaccgcatgaataaaccaacattgtcttacgcaagttcaaccctgaactcgaacggcgatggtgttgggatggtcttcttcaattgttctaccgaccgtgcattgatcgctgatcccaactccgttgaggttatcagtaagtaa

SEQ ID NO: 719 - DNA, 333 bp, Goslarvirus sp.
  source 1..333: mol_type = genomic DNA
atgggtaatattgactgtgatagccgtaagcatacgtggaaaccatggtcggcgggtaatctctcggcacctattagaatgtccgacttacaatcacatccgttctttgttattattgaatttaagtaccgatcaacaacgcactacgttaagcttggttcgttccagatagaatcgttcaatatatacgaaatggtaccaggttttccgggatgggcaggtaacgtgatgagtcaaaacggtaaggcggtgcccggttgggcttcgcagcttgtttcagggaactggttgacgtcgtttgttggtggtaagcgatatctaaattcaatttaa

SEQ ID NO: 720 - DNA, 642 bp, Goslarvirus sp.
  source 1..642: mol_type = genomic DNA
atggctataagcacagataaaacaccgaatagtggcgcacgtttacaagatggtaacgcatggtacgacaacaccgatgcttactacaacaccatgatctgctggacgttcgacgttcgtgatattgcgacacaagtccagaacaattatcctggtaccaaatacctggaatcgataaacggatatgtgaacgcaaaagaaaagaaacacggacaaggtaccaaccctgttatcattccgaatattccaccacagcagtttacctcacttaagaacatgagtccgtcgctatggtggaacgcgggcggacgcggtaacaacggtaacgtatattgcgactcgcgtagccatacctggcagccatggaacgcgaatgcgaactggtcagccgtccctgtgaccgaattgttatcgtctccgttacctgtcgcgtttgtctttaaagcggtttctggtaaacataacgttgcggtatggaattgccatctctacaatttaactttctattacatccgtcccggattccctggttggtgtggtaacatcatgagccagaatggtagagccgttccaggctgggtatcacaactcgtcagcgggaactggttaacttccttcgtgggcggtaagcagtacatttaa

SEQ ID NO: 721 - DNA, 2613 bp, Goslarvirus sp.
  source 1..2613: mol_type = genomic DNA
atgaagttacatgaaaccgcgcaaaatgaaatactaagattggtcaacgagaaaaacggactttctcttactttcgacgatgttgaatttgcacgtgttctatcggcacccgaaacaacctccattctttttaaagggaaagatggaagccgatactacaaatccgtattcgtctcgttggttaaacgagacctcgctaaagcgttcttgggaatacctgtcaagattatcattgaagaagatacccagttacgtgaaatcatgcaagcggtcgctgaccgttacggcatttcctttgacctcgcaaccgacttcctacaaggacaattaaataaaacgacaacaacgtctaccacaggccgacaatctgttaaagtaacagcggatgagggaagtttggtttgggcaggcgatcttgtactaactgttgaaaaccgtaagtacaacctgttgtcgcttattcagcatcttgaccttaccggactgaaatatcttaacgacgatagaacgaagggtgatgttgagttattgattgctggtatcgaccctgatcgctttgtaggtcttgcaaacctacaacagggtgaagctatttaccccgccttagcccatcgcatcgcggatgcgattcgtcgagaaaacgcacctgaagatatcggtttacccgcgctgcgtgggttatttgaaaacgcaacggtcacgaaggtggaacgtacggacctcggtgacgcttacagtgttccgattaatacgaacgaccattatcaaggtactgcagtattccatcttaataatggcaaccccaaaggcgcaccaacctaccgctacgcaaaaggtacgcgtaacctctggcaaccgatgtattggattatcaacggtcagtcaacagagaacttcgcggttgtcagtgaagacatggtacttaatgcgtatatgcgatgccataccgctaacgggttggtcgggatagaatggcggacaacggatacgctggatcacggttgtattgcgtatgatcccatgacgtcgttattcggtttgatctttaaagcgaagatcacgtttactggcgatcagcgtaactttgcagataccgaaaacccgccggttttaaccgtcgtacacaaagacgatagccgtcagtatatctcattaacccgatacgccaccgatgtctctgaagacggtagaagcgcaatcgtaacgatcgatttcaatgacgcaatggcggggttctatgctgacgagcctatcgaactcgaatcggtagcatcgttgatgttcagcatgagttctcgacattataaggaaggtgcgactgaaacgacctatctggaaacgccaatcgacctcggtttaaccctcgagattcttcctatcgatggggtgtatcaggaaatgacggttaatcgtcaccactgtacaccacacgaacttcgtgcgataaccgcttacgatgaccattacaacatcacgccagagcgtgtatttgagaacctggtttatgcggggtatcaagatgaattagtgcattatgttggaatgtcgcatttctacgatactgtctggacgccaagtgcgggtaagttactggtgaacaccacggatgtattaaatccaccctgtatcgcgtggcatgaagctttcgccgcatatgctgcaaaacaccatttctctgtcaccatcagtttaagttacgaattgatgagtacagcatgtccattcgagtgggcacagcaggattgggaagggactatcgcagcaaccggatatacgccaccgtcttggttgctgtctccgtgtaaccaatatgcgatggcatggttaggggatgtgttaacagcatttgctgatatcatctatcctcatgtccaggacatttgtgtacaagtaggtgaaccctggtggtggatcaatacggcgaacaacaaaccgtgtatctacgactaccaaaccaaactggctttcaataaccaatatcctgacaaatatgctgccgacatcggtgatattaacaacccgttatccggtggtgactacgatctctacgttgagttttgtaacgaacagttaggatacagttgctggaatctggttaaccgggtaaaatcgaaatacacacagatcaaaaccggtgttcttccgttcttgccgacgatcatgtcgaatgcattcacggagaaactcaatcttcccaaagcgtggtataatccagagaaattcgatcggttctattcagagtgttacgactggattattgaaacgcatgtcaccaaagctgagcaagcgatcaccattccgcgagatacgcttggtttcccggttagtcagattcactattacctgggatttgttcctggtgaagatcttgcaccgctttatggtttcgatgttaaaacgccgtataaacgcgaactctggaaacgtatcatgggtaaccacgcaaataacctggatatgttcgaaggactcactcagtacatctgggcgtatccgcagttcatcggtgatagcattattcccggtcaggttcccgaagagttttatttcctcggaaaacgttatgatatcattcgtacggacattccttttgattttacgccggacgcttaa

SEQ ID NO: 722 - DNA, 570 bp, Goslarvirus sp.
  source 1..570: mol_type = genomic DNA
atgaaagtaaaagacctttacaaaataaaaccgcaaacgatgggtaccgcgagcttggttctcgttgatggacgctccctggttgatgcgcttaatagttacgacaacatcaacattcctgtcggtcaacgattaagcatacagcggttaaaaaagcatctcgatgatgctggattagctcctgacacacgaaaagaaatcgaagaattggaaatcgatgaaacgagttcagttgaaggtaatcttcctgatcttaccgctattcatgataacgctaatcaacccgctgtccaaaacttcgttgttgtcgttgcaacaatctcgctctttttagtgacgctagtatacaccggtatctgggcatggcttgcgttcatcgcgcaaaccaaaccgagcattaaccatctgttcgttctggccgcttgctggacgatggtgatctggaaatcacaaggcatcatcagtcgcgaacgtcgtgatttgatgtcggttatcgtcggcgatgcgccaagtaaaaatcgcttttgggataatatcgaaagcctgggtaaagtgatgaagaatcgttga

SEQ ID NO: 723 - DNA, 375 bp, Goslarvirus sp.
  source 1..375: mol_type = genomic DNA
atggctgataccaccccaccatggatcgatctgaatgtgcatcttgtctggcgttacgctggacgttacacccacgcgcacgattttaatgacggtaaacttagttattacagcatcgcttttaccgaagcacaaatacgtgcgtggttcgctcaactgaattatcccaatttgattgcaaagaaaagctattcaatgtcaagaacacgattaactgtgacattggagctgttcaataaatcaacatgggttgatgcgtaccggcttcgtgaggttattgataggcagttccgtaaacatcgccatgaagtgccatcaatgccgaagaaagatcctattgttccaccggaagatgccatctggaacgaacattaa

SEQ ID NO: 724 - DNA, 561 bp, Goslarvirus sp.
  source 1..561: mol_type = genomic DNA
atgaggacaagttacgacgagaagaagaacgtttacgaaacggaaaataaaatggcgagatttaccagtttgattgggttggatatttgggaaacaccggctgacgttcgggttattcctgttaacaccgtcggtgtgatgggacgtggtcttgccaaacaggcagccgatcgtgtacccggtcttcttgaagcgtaccgtaagcaatgtcaagatgggtttaaggtgggcgaagtcgtgtcgtatcaacacggtgataacgatcaactcacctacgtgttgtttccatcaaaatcggattggcgtgaaagaacacgacgcgagtatatcgttaacggtttactggcgttaaaagcatggttactggagcttcagttcgaaagagacggcttctcatatcggcgtccggctgaaccgctgatcgttgcaattcctccggttggttctggttgcggtaatatcggttacggacaatccgaaacaatccagcctcagtgggtacgcgcacaaatcaaacagtatcttgccaccgtaccgaacgttcatttctacttgttctaa

SEQ ID NO: 725 - DNA, 2085 bp, Goslarvirus sp.
  source 1..2085: mol_type = genomic DNA
atgagcgaacaagaaaaagaagtcgtgacgaatcaggaagccgttgagcgttcagagtcgtccgttgaaacaacgattccggcaagttccgagcctgttggttccacacagcaggaaagtaaagacgaagtagtggctccagaagcaacccgtgaagaagaaccatcacatccaccgctggtcgatttctcgaaggcaacgatacgtttccaatgcgaagacattcgtcctaagagtccgaagaaaacaaaacgtcagccgttggtgttaccgctgtattctccacgtgtgcagacaacgtattaccgggaatacatcaacgaagcaatggataccgtgcaagccattgtcgctcaacgcggtaaaccgacagacgaacaatttgataaattcagtaaagcggtggtgcaatcggttgctgatggacaatatcatccgcgtggcccagctcacgatcgcgccttggaacgtaagggcagtcagtggactaacgtacccgtagactcatcgggtgttggtcgcgttattcctggcattccacaaccgaaccatatccctgatgatgtcgaagcgccgctgacaggaaccgatgcgatctattttgccatccgtaatacgaaatcaggtgcgcctgcggtaatgccgttatggcatagcggtattaagctgcagtttaatccgccgtcaaatgaacgtgttgcaattatgcacgaacgtattgcacgcgataaaatcctgggtggacgtgatagtaccggtttcctgttttcagcaacctcgattatcaccatgaagcacgctatcgaattagcattagaatgctgctacatggccaacgtaccgaacctggatatccagcgtttgaaagacattattccggttaccgatgttccagcgttattgctgaacgtgctggtaaccatgtacccgtacggatatccttacgtacagacctgctatcagaatccagaaacctgcgactatcgtgttgaagataccgtaagctttgcaaaactctatcaagttgacaacagcgcgataaccaaacgtatgcgacagatcatgaccgaaggtccggtcatgacggatgaacttttgcgtgagtatgcaaacgaactgggtgaaacaaactcccgtacgctggatctgtccgacaacggttctgttatcattgaacttgaagtaccgaagatttcacgtcagatcgccatgggcgaacgctggttaagcgataccctggaagatctgcgtgatattctatcgcgtccgtcaatgaccgaagaagagcgtgatcgtgttattcgtgaacgtcagttctatagctggatgcgtcagtatgatgcgtggatcaaatcgatgcacgtgtcagtaaacggtaccatgcgtcgtgtaagcgatgcagatacggcaacggtattagcacagctgtcacgagacagcgaccttcgtgaacgttatattgacgggttgatgcaattcatcggtgattcgacgattgcgctcgcagcgatgcctgcctggaaatgtccgaaatgtaatgccgatattgctgacaatctgcgtgaccagaaatactacgatctgattgctttggatgtaccccagcttttttaccctaaactccgtccaatctcttcaggaggggatggacgcggtattctaatcgatccgcgatacgggttacatgatggacaacttgttcgtaacgatgaaaaaatctgggaattgctattagcccgtaaaggcgacggtggcatgaaactgaacatcgaaatgggtattgcgtacgataccatgtttggcttgtacgatcgtgttaacgactggacgccgttgaaatgggttgctcagcatcccgctgaagatccctgggacagattagggattaaacccttaatcgaggattatgtccgattcggtattaaagagttcatgacgttggatgcgtttttacaagcaccgtatccttacgcgcaaatggtactcaaaatcgcacaagacgaactgcggaaacgtagtgcggtactggacgacgatgaggacaagttacgacgagaagaagaacgtttacgaaacggaaaataa

SEQ ID NO: 726 - DNA, 366 bp, Goslarvirus sp.
  source 1..366: mol_type = genomic DNA
ttgttattaggtaccctgggtgcagctatttaccaagcgacgcaaccctgtcgtttacgattaacccaaaacaaacgtgatgagttcgttgcattatcaacaagcacgaataaagatctgaccgaacttcaaaccgagttgacgacgatcaagaactccatcacgccgatgtacggtaaagaagttgatgaacaaagtattctgttacagtacaactacgggatgtcgttaatgaacatcctggaacgcgcatccgatattctgcgtcctgacgttgcacgcctaagccagctgcgtgtcgaagggatggagaaccagatccgattcgctaacagtgttaaatctcaaggagccaccgaagcatga

SEQ ID NO: 727 - DNA, 96 bp, Goslarvirus sp.
  source 1..96: mol_type = genomic DNA
ttgtttcagggatcttaccttctaacaaagccaagacggaatcaatcatatccactccgatgcggtaaatgtctactagctctcataatctattga

SEQ ID NO: 728 - DNA, 873 bp, Goslarvirus sp.
  source 1..873: mol_type = genomic DNA
atgattgattccgtcttggctttgttagaaggtaagatccctgaaacaaggcgtacgctgttacagcactgcatacatcgtttataccaagattttaaatgtgaacaactggaaacgttctgcagtacgatgttgtcaggtgctggggaacaatacgatttaaacgaattagacatcattttaacaaacggatgtatcgaactttataaacaacaattgcttgccttcgggatccgaattaacgaagggcagctaactctggatagcctgaaatatcttcatgcgctagcgtctacgttattagacctggaaacacacgacgataccgcttttctactcgctatcgttgaagatgaagactacaccacagctgaagcgctagcggaatgcgcgcattatatttacggcgttgatgctgttaacgtaaccccattaatcggtttcgtgcattcaagcttacttccacgcattcaagaggtactgaccaagaagctggagaaagatagcgaaaacgtcgtcgatgaagaaaacgtccagattccggatcatattcgtcgacgtattcgtgtcatcagcgatgcgttcccaccagtgttcagccagtatattgatgaagggggtacgatagcggttccactggacctgctaatgtcgcagtgtcgggatcagcttactgcattacgtcagcaaccgtatgcatacacccaagaactgattgcattcgccttagcttccgatctcgaagataatgaactcgtccctgtcttacgagaacttattaccgcaaacttcccgatggctgaagaatccaaagaagcaacccgagcgttatcagagttcgtttcatgtcacggtgacctgacccgggtttaa

SEQ ID NO: 729 - DNA, 1302 bp, Goslarvirus sp.
  source 1..1302: mol_type = genomic DNA
atggcacctcgtgaatatttcctttacgcgatgcgtgaagggcactaccgttatcttgaatggattaacgacgcatttgcttttacggaaggcggcgctgagaagtatcagcctaaattacgtcgtcaaggtaacgtcgttacggttaccatcgacggtgaagaacaccaatgggaaaccgagccaacaaaacccctgttgagtttctgggagccattggagcttgcacctggtgatctaccgtcggttaagaatacaaccaccacaaccttcggtgaagcgttgttcaatatgtacgtcctttatgatgctttcggtattcagattgaataccaggcaggacggttgaccagcggtacactggagtcactgattgcgccacgcgtcgctgacgatcctgaagagggaatacccgatcctaacgaacgtccaattggtccgttgtacgcaagcgaagtgaagaaattcaccaacaatattagtgcgttaaccgctatcaaccgtttaattgttccatcaatgagtgataaagcgttaacggtcgatgatgatattattgcctatcgcgataaagagttagcacgcttacaagaggaaggtaagttcacgcctgaagaactgatcaaactcgaagccacgctgaccaaaatggataaggaatcctttaagggtgatgaatcggaagggttctatattaaccccggtaagagtttcggtaatactcgaaagaaaacgcacatcatgatgggggttgaagccgacttcgttgaccctggtaaacgtaacgttatcacacacagcctggctgaagggatgcgtgtcgaccattgggcggagtacaacaacagcgcacgtgcaggttcgttctcacgtggcgcactgaccgctttagcgggacagacggcgaaagaatcacaacgtgcgacacagaaccttaaaatcacgatggacgactgtggtacccacgaacatattctgttcacggtaaaccgcgatcatatcaaagataagctgcttgtcggccgttacatgatcgacggcgcagcgcttaaacttattgatgctgaattacttgcttccttggaaggacagaccatcaagttacgtgatcctcaacgttgtaaagcaggcccactggaatactgtgctacctgttgcggtaacgcgatggctccaaccccagacgcgatcggggcagagatcaccggtgtaaacaacgttttcatgaacactatgatgaaagcaatgcataacgccagtgtatcgttagcgccttacgatcccgaactttatattagttaa

SEQ ID NO: 730 - DNA, 627 bp, Goslarvirus sp.
  source 1..627: mol_type = genomic DNA
atgagcaagaataaagaccaacgttctgcaaaaatggacgaggagattactgcggtagaaaccaccgttgcagatgctccggttggtgatgttgtagcacagccggaaacggtcgctgttgagaagaaggaaaccgttgttgaagaaaagcctgcgaaaccagcggtgaaagaatcgcctgctgtttctatcgtggcttctcgtgccgcaaccctggttgccccgttccagaaatatgcggaagaaatgggtccgaccatgccgcaagcaccgcagtcgttgatccgccatcagcggtctttaatgtctgccttccgtgcgttactggatgtggataatcctgaggttttccgcaccgcctttgctgatattctgaagatctggaaagataacagcgaaggagcatttaatgcaaaccgttatctgtatcgtggcatcgataacatgccgctggactaccatacccgcatggctttcctgacagtactgcgtctgatggatgcgatctatgatgaaagccgtcgccaggttgaaatccgtgctatcgaccttaatatcgcaattcctgaaattgcttacttcgatacacgtaactatctggcaggttacatgcgtcgcttcgcataa

SEQ ID NO: 731 - DNA, 117 bp, Goslarvirus sp.
  source 1..117: mol_type = genomic DNA
gtgagagattctcattgcggtcataaactcttcccgccccatataagggcagggaagggctttatgccgttgaatttatcctgtgcagaaaataaaaataggaaaagcactccatga

SEQ ID NO: 732 - DNA, 402 bp, Goslarvirus sp.
  source 1..402: mol_type = genomic DNA
atgaacgaaacactcgaacaacccgcaatctatcgttggacatccgtttggaattatgtttcttttagcgttgacaccgcaatgcaagctgtaatggattataagaataccggcaaaacgaacgaatggttagtcatgccttgcggcgaccttattcgtactgaaggaatgtatttccctaatgccgggaaagaccgccgtatccaggacaggatgcgtacgacgattctgacgaatggtgacgtcatgatcgaatgttgggctgattaccccattgatcgtgaacaccaggatgaaatataccagcgtttacgcgatgaaatggttgccgcaacgaagcggtattcctgtcgcgttaagctgtattgctggttaaacggcattgccgtccacgacatttaa

SEQ ID NO: 733 - DNA, 129 bp, Goslarvirus sp.
  source 1..129: mol_type = genomic DNA
gtgggaggagggttctatgctgttttttatttcgtgttaacgcagtttatttcgcgactacattaccttagtgataagagcaaaatatcttatcatctatttaagacaattgcaaccaatccaatataa

SEQ ID NO: 734 - DNA, 426 bp, Goslarvirus sp.
  source 1..426: mol_type = genomic DNA
atgttacaagctataaccgggcatattaccgctaactatatcaccgttgtagaatttctgcgtaaacgaaaatacgaaaaacaaaacccaattcttgaagatagtacatacgaaacaaaaatcttccgcgtcaatcgcaatacgaccgtcgcaacatctgaaacaggttacactgtttatatcgattgtgatggcttgatccctaacgttaaagcacgtgcggcaacactgttaaaagtcaaagcattgctagataaaaacagaccacgcatcacaggttttgacggcaaagacattgcttttgtttatcacttcgacaaacgttattcatttttccagtattacagccgagacggtctgttaacgcataacggaccggcggttgagatctacagtcgttatgccttatatgcatcactgaattaa

SEQ ID NO: 735 - DNA, 603 bp, Goslarvirus sp.
  source 1..603: mol_type = genomic DNA
atgtcaattacccaattcgcgaacagcattcgttccagtgaaaccaccgtacagctccttaaagacgagctgcgtaaagaacatgaaaccgcagccaactatctgaaagaaatcgaagcgttagtttatcgtgaactggataacgtagaacgtttcttgcaggcgggtatggatgaaaacatggatccaaacaaagaagtgttaaagccacgtgttgacttttacggttcagatatcgatcgtgcgattattcgcatgtaccctaacgattacgtcaaggtcgacctcaacccaattgtaaccaacatcaatatcgacctgaaagaaaagatcgatctgccgaaacccgatggagatatcttgcacgcgatgaatgcgatcccggtactgaaagcatctatcgtcgacacgctcaaggaacgcaatgaacgtcgtctggttatcagcgtggattccgattcggtttctttttcagtctacatcgatgctgacggtgaagaaggaaatccaaaagacgtccatcgccagcttgctgagtatatcggtgagagaccgagtttcggtatgggttccatgatcgtcaatatgctagaaagcatgtaa

SEQ ID NO: 736 - DNA, 495 bp, Goslarvirus sp.
  source 1..495: mol_type = genomic DNA
atgaataagaaagtcgaaatgcatggtatttgcggacgtcctgcggaagcacttaaaataaaggataaagtgcacgcccttctctactcagtgcctgacaccacgctggttacgtgttgggatattatcgatcagacgatactaaaactccaggcgaatttaataaacgatcgttgctggagtcccgctttgtcggttgacgataaagtctatctcgtaaacgagacaaccgataaagataataatcgtatcgatcgctggcgttttgcgttgcacgacaacattgttagtatcgacgttatactgagtataacaggtgaatcgtgtattgctgtcaatgaagtagcggcatacgccaaactaaaattagcacaatgttttcattcgcgtgtccgaggattcgatatgcccgttatactaacaatcaacggacacgacggttcagggctgttcgaattccactacgatcctgacaatgaaaacacagaagagtaa

SEQ ID NO: 737 - DNA, 459 bp, Goslarvirus sp.
  source 1..459: mol_type = genomic DNA
atgacgacatgggattcttacggtgagcagctggtagaatcgataattaaaagctttgaaatactcgaagtaagattgcaggaggacgggtgctgggaattatttaacgagcccgattccgactccgaaccttacttctacaacctatccgttccatcaacacaacacggcaatgctacgattgtagatatcaccgatatcagagtttacaataatcgtatcgctgcgacagcacaattacctttcagcgtaaacgggcttgccgcaaagcaacttctaatgtatacagccaacgagacatttggtaaatgcataaagtcgcacggtatctcgttccccctagcgatcgattatgaattatcggacggctgcaatctcgttacattggaatatgagccggataatggaacagcgagtgcagcactcgctgttccgatgaagatgaaaaaagaggtatga

SEQ ID NO: 738 - DNA, 465 bp, Goslarvirus sp.
  source 1..465: mol_type = genomic DNA
atgataatggcaacggtttattcattcaaatctaacgtcaacgaacttttcgacatgcataaagacacgtacgtcgtacaagttgctgaggtggtcacgcaaagcgttgatatcctcaagaaaagtctacgcaattccgatgaatggtcagtgggaagtagcgatattgacgggacacatttctccgttgtaaaacgtatcccaacaatgactttaactggggtacatttcgacagcactgtcgtctttactatttacaaacaccgtatccttattaacattaaattcccattcatagcaaaaggggagaataccatacgtcggttatctgatgttgctgataacgcatttacgaaatccgctatgccgtgtgatttccctattacagtagcactcaagtttatcgacggccgtgaattccactatgtggaatatacgtccaacgaagaaggaactaaggagtaa

SEQ ID NO: 739 - DNA, 768 bp, Goslarvirus sp.
  source 1..768: mol_type = genomic DNA
atgtctatcagagataaagttcaacgattaatcgaattcaaccaacagtgtcgtattgatgaactcatcaatttcgtaaaccatatattcgataagtttgaagaatcgttaaacgacgatatgtgggataccgatatcgttaacggtaaagcgtatcttcagaaaaccgtcacggatgtcgatgaaacacaatttctggaattcggtttaactgacgatggtgccgttattcatgcattattgcatccgtgtttggacaatgtcgacgcaaaggcatacaagccgtgtttagctaatgctttcgaaacgagaacagatcaatatgaataccctgttcgtttagttttatgtttcccttctgaatcgaatgctaataacgcgataacattcgacacgaaggaactattagcagaatacgatcccgataaagcaagggaacaaacctattgtatcgccgatgaattcatcaaaaatcacgatgcgttaaacagggtatcggacccgaagaaaggatttgtacgtgactatacatgcgggccattacgacgacttgtcgtaacccagacacccgatggcgttaacgtgcttgggatattaagagatatgaccatcatcgataacgatgatgacggattaaggaaaacgttagatacccggttagtgaactgtgcgtttaaatacgatacgacagttacgttcacgctctgtttccatccggctttcccatcgtgggtaacaactgtctataaagaaagcaaaaataagtaa

SEQ ID NO: 740 - DNA, 396 bp, Goslarvirus sp.
  source 1..396: mol_type = genomic DNA
atgagcattgtagaatccatcgttaaagctgttaacgacaacatcgatcatccgcgcatttctaccatgatcgatattattaaacaagaaaaaacacctggttcatacattcgttttacccgtttggatagcagcgatttacttttcactgtgaaaaccgaggttcacgagcaacgtatcatcgtagaggtcctggtaaaggagaacaaagaactagactggcactctgttcgtggtgacagagacgcgagaaatttacttaaagaacatctctgtaaaatggaagagaaatacaatatcccatttagcttagaggtcaatcttttcccagcgtacctgctctggtacgtcagtagtgagaagcatgtcgaaacgacaactgacgtcaaagagtaa

SEQ ID NO: 741 - DNA, 399 bp, Goslarvirus sp.
  source 1..399: mol_type = genomic DNA
atgaacgttgctgattccgtcgctaaagcggtcatcgataacatcgaccattcgtatattcccgccatgatcgatctggttaagcgagaaaacgtatctgactcgttgatgtgctttagtcgtatgctcgaccaagctatactcgaggctgtaaacgtcagcgtacatcgccaacatgttctcttcgaggcgtatataaagaacgaccaacatcgattaggccaccacgcgttacgacacggcgagaacgcgctggagcagctaacgaaatgtctttatgcgctggaagagaaatataacattccttgctctctagaggttaaccattacccagcgtgtcggatttggcgtatcgctggtaagaaaggcgcgacgccttcagctgattgcgaagcataa

SEQ ID NO: 742 - DNA, 465 bp, Goslarvirus sp.
  source 1..465: mol_type = genomic DNA
atgccgattataacaggaaaagaaatcatgaacgagaaaaccaaatcgatgaaaaagcgcttagatcgtctattcaatggtcccacgcctgcatccgtcgttgaggatgttattactcaagcattcgaatgcgtggacagaggtcttaatagtatccttgggtggtatcagaaagaacgtgaaggtaagctcgtccagtgctacaatgaacgtcactttgatgatggtggtatcagcggcgattactttatctatttatttcccgataaaatcgcgatcaacatcgaattcgataatgcgatgaacgatcaggaaataacatcgatgcgccaagccgcaaaacaaaccttcggacgttgcgtggagcaatacgatcccgatgtgtttatcacatgtcgtattttcatcgagccgagaaaattaattcagcatatgtcctacggcaccacggatgacgatatctaa

SEQ ID NO: 743 - DNA, 486 bp, Goslarvirus sp.
  source 1..486: mol_type = genomic DNA
atgaacatcaactttactatcgaatccggcgattacatgaacgatcgtgatatcatcccattctaccgtgaggatttccgcaacgctattcttaaaacgattgaggatgtcttggatctcgctgaagatcaacttagcagcatcacccctgaaacacacgtaaaagcacgtgacgaagctctgggtgacttgtatatacctaaagcctgtgatcgctgctgcttcactgatttcttcgtgtctacgcaagcggtcgttaccgacgatgggaagcatcacgtgatccttatcttggcttctcatgagcctatgatcaatcacgcactttcttttacacccgggtacatctatgcccttgcaaacaagccgatgatcaacgaaatcattgctgacatccttagtaagatttgcaaagaacatggattcctgtctattttcttaaccgacgctgactacaaagtaacggttggtaacgaacgcgcataa

SEQ ID NO: 744 - DNA, 105 bp, Goslarvirus sp.
  source 1..105: mol_type = genomic DNA
ttggtaacgaacgcgcataaacctcacccctccctccggcttccgccagggggaggggcttcgcatgtgttttcttttttgttaagcgaggatcaacctacttga

SEQ ID NO: 745 - DNA, 1752 bp, Goslarvirus sp.
  source 1..1752: mol_type = genomic DNA
atgagcgaacaagaacgaaaacctaagaagaaactgctcggtattcaatgtcgacacatcagctataacgaagcgaacgatggcagcaagaacgacctcatgatcgcaaaagagatcatgttcttcgatgataatacgcaagcgacgaaccttcgcttcttcgagaattacaaacgtccgttttgggtgacggtagagagtaaacgtaagaacaaatataaaaaggaaagcgagaagctctcgcatgtgcgtcgctacgatgtccgccaaagcgaactggttgaaaagatcagctcggtactttataaaagacgtgctgacgataacacccgtttacagcagcttgcacggagtccatacctctatggaacggacgttagcgccagctgttatttaaaaacccagtacaacacaaaatggccggaatacgtcgataaattacccgcttccattgcctgtttcgatatcgaaaccgacgttgtccacggacacggtaagatcgtttgtatgtctattacaatgggatacaatgcgatactttgctataccaaggacttcgttggtcatattccgaatgccattgagaaaacccatgagaagattcgatattacctggccgaacgtctgaataccaaagaagatccccacgcattcgaaaaatatcagtacgatgttcgaatcgtagaaagcccggcacaagcggtcatccaatgcatgcagaaggttcacgaatggcagccggattatctccttggctggaatatcgcgttcgatattccgcgcatgctccaggcactgaacgaggaagggtatcgtcccgaggatgttttctccgatccccgtataccacctaaatatcgtattgctcgctgggtaccaccgaagaccgacaaggtatctgcttcaggtcgtaaaaccaaccttacccttgagcaaacctggccgatgttttatacgatggctacgtatcaggttatggatgcgatgtgtggttataagttcgttcgtttaggaagaccggatgaaggacgctattcactcgatgcggtattagagcgaaataaatgtcatacgaaattaaaagcaattcctggtacagaagggttcacggagctcgcctggcacgaagagatgcaaacgaaccatcaaatcgactacggcgtatataacctttgggataaccagggtatcgaggcgttggaccagaaaacaaaagactattcgatgaccatccctatccgtttagcagcgtcggatttgaaagatttcagttctaaccctaaacgtatctgcgataaacttttcttcgtttatcttaaccgtggggaagtcatgggatgtaccgctgacgacatgacccaggaagaagataagtgggttatctcacgagctggacatatcgtcacattaccatgcgatctcatggctgacaacggcattcatctcttctgggatatgccgaacctgagaagttatatccgtctattcgttgcagaccttgacattagcagttcatacccgaatgggcagatcctgttgaatctatccagagcgtgtgtttttcgcgagctctcacgcattgagggcgtctctgactatcaattcaggaagttaggtatcaactttattaccggaggtaaaacgaacgctgtagacttctgtagaatcgtttataaagcaccatcgatgtttgaacttttagaacatttcgatgcaacgcgtccaaaagaggaagcgcggaccatcgaatga

SEQ ID NO: 746 - DNA, 1311 bp, Goslarvirus sp.
  source 1..1311: mol_type = genomic DNA
atgtcattactacaacgcgtgtatggtcatgacgaattaacgatggaggccatcaagtttcaagatggttccttgttcaaggaaatgaccgagttcttcagaagcaaacagggactggataaaaaagaggttttaaacgttttcaaggacggtcgtttaaccgagatggttaaacgctatacggggttgaacatcgaattctcggtcgacgtgaaaatgggccggatgaatgcctacgtgtacccgccggatatttcgacaaacaacacaatcctggcagactatcatcggttatggatgcgcggtgctgatggtgttacgctccttaagaagattaaagatacacctgtcggttacgtcgatttagaaaaaggtcgtgtttacggtatttttgaagaattgaagattcgttctgccatcacgtatgaactgctaacggcgacagaaccctttcttccggaagaaaaagcagccataatgctgcatgaaatcgggcacgcatttaccttccttgaaacattgtcggaaacggttcgtgtcgaagcctcaatcatgaccgtacagcgtgaactgttggggacaaccgataaggtaaaacgtatcgaactggcgaaagcgttaaacaaaacgttggataccaacgtcgacgtagacaaaatcagtgattcagacgacggtagtgtctggtacacggtttacgtgtctaacagagcgatgcagttaagaaacgtaaacaacgctggacgatataccgacgttgcttccgaattcatggctgatcagttcgctacgcgtcatggcggtggggagtatctcgttagcgggcttgctaaaatgtatcggctttatagcaaagactccgtgaagtccaaaacgatgttctggctctccttcatcatggatgctactatagcttctatgatggcgataggtttagcttctgttggtgctatcggcgtgttggttgttgtcgctgtaaccgcgctttctgtttggttagatccgacatacagcatttacgataacgacatggaacgattccgtaaaatcaaacaagatttaattatacgcttgaaagatcgtgatatcccaagcgatgttcgttccatgacgctggatgccatcaaaacaatcgatgaaacgctgagtgcgatgaacaataatcgtacattttcacagatggttacacttatccttcgtcctggggttcgtaaagcggttaaacaggaagaaattcagcaagtcctttcttctacaatgaacagcgatctgttcaaaaccgcagcgactcttgactccattatcgcctaa

SEQ ID NO: 747 - DNA, 441 bp, Goslarvirus sp.
  source 1..441: mol_type = genomic DNA
atgaatatttctgatttcgccgttcagctgaaagacctggtacgtgatttcccagccgaacaacagacccgtgcgctaagtattgccgcaggttatatcgctggttacagcatgcccgtattcgctgaaaaagaagatctgaccgcagatagcattttcgttcgcgaacatctccctaaaatccgtgaagggctggataagctgaacaaggtactggttattgggctggccgatgcgttagacgttgcccgctacttctggtgcctgcgttaccgcatggtgcatgagccgaccgcacctgaaaccatgctgttattagcctccgccgttcgtgaccaagaaaccgcagggctgcccgacgttatcgaaggtgttgatcctaagctggttgcgcaactcgcaacggctttcgctaacgcactgcaaggagagaatgcatga

SEQ ID NO: 748 - DNA, 2796 bp, Goslarvirus sp.
  source 1..2796: mol_type = genomic DNA
atgagtatcccagttattaccccagaccacaacgaattcggtttagcaaccgattacggggtggttgaaatgcgtcacggtatgctcatggcattccctgacgaagacatccaaaccagtgatggttcaagcgtcgttaccaccgaagatcaggaaacaatggtctccttcgatgttgacgaattcgtgacctctggtgaagaaaacgttcgtcttcacgaacaattagtaacacgcggtatttctcgtgctgatgtaccggaactgcgtatgcgtcttggtgacgcattcccgaaacaactgccggatgctttcttcacggaaatcccatcacgtaacggcgttgaattggtgcaggaaggattcgttgccaaggtctctaaactgtttgtcgatggcgcgaagaaagtctgggaactcatcaagcgtatctgggcgtttatctttgcaggaatcaagaaagcagtacgatacgtctggaaatattcaaacgttgatacgaagaagtttatcgcaacaactgatgacgtaatcaacgatattgtcgatgcgttaggtgctgattacccacgtttcaaagaaatgttggataaacagatgacccttagcgacgtatataaagagcttgcaggttacggtggtgcgataaaccttaaggaaatcgctgacaaaaatctgaaagagaaagcgaagtcggttgctgaatggcttatggtcctggttccttttgttaccgctaagcagaaggaattcgctgatatcgtaacgacaatgagccgtaacggcagtacgtttttggatacggtaccaaacgtacaatccatcgttgaattcagaaacgctttgaacgattattggaaaaccccggcgtgtgtaggcgtacttgctggagttgttccgttagtttccgatggtacaggaattgttgccgccgctgatatcgtcgaagaatgggtacagaaacatcaaactgaacttcacgatgacgcagctattcgcaacaataaggaagcctgggttcgtgagcttcacgatcgaatgatggagttggctgaaccgtttgacacgtttaatgaagtcaaattcgaacaaacgttaaatgaggccgaacagatcttcaaagcaacgaaggaaatgaacccaacggctgatattcaagacggcgatattgagctgtacgaaaagcacatgaagctaacatatcagacattgcttgcttatagccgtttgatctcagcaatgtcgcgttggctgatggatgtgcaactcgctcatattcaggtagaacaactcgttgcgcgttaccgtgcttttgaactcaagaattacttccttgttcttgagcgtgacgccgactggaaacagatcgtgcaggcattaaaagaacgtgcgttgaagccggtgaacgacatcaaagcggaatatcaggcacagaaaaaagatgttatcgatgtcgataatgaagcgaagaagatcaagatcgacgtcagtgactttttcaaattcttaagcttcgaagacgacgtatccggttgtgcttacctaacagaatctgaccgtcaggcacgcaaagatcttgttgagattgacgaagccatttatcggacttcgcatcgtggtgaggtcagcaaaccagatgagcagatctatctggagctgcgtgaacggtatatgccagaccaagcgttagagccgaccatggaatcgttcggtatcatgaagatggctgttatcggtgtcatcatcacgacagcctacactgcgattcgtcgtctgttgctctggattattgaactcttgaagaaacgtaccgatagcgtagcggccaccgaaaaagcggccaacgacgccatcaagcaggcgaaacgtaacgcgaacgtttatgttcctgatgagcatgttcgtaaagaggttgataaaaccgaggataccgacgcaatgcgtaacgttgttggtgcacccagcaagtcggcctctgatgttccattgactacagaacagaaactttcggctgtttctgcgattgttgatggtatccgtaaggagatggtaaccttaccggtgttcgatcgtcttcagcaagcgtgtacgtctttaacgttgggttatttccaggaaggtaagctggatactattcttcgtgagatgcgtcgtctacgtcctgatcgtatcgtgtatctgaacgaccagtgtaaagaactcgaaggggcgttagaagaccagaaacgcgctaaagaaggcgagattgctccgcgtctggctaacctggccggtaccatgaaacagggtatggaagcgtaccggatgctgtatgataattcgctgactttccgtttcaacgaattgacaacgtctgcacacttaccaccgaaggacttcgcggaattcggtgagaaagtactgcaaagcggtactcctgtgtatccggacaccaacgtacttcagcagttagcgaccgcacttgacggcaacagctatctgttatttacccgttctggtgacgaattcagcaaacttgccgacagtaagtttaaagaaatcgaaacacagttccgccgtttaaatgacgttgctcgccaggtgaaagccgttccgcaagaaaacgcaaccgagcttcgctcaaccgttgattatatcaacgcacagattcgtgaaatcgcagcgtggtatagcttcgaagaagccttgcgttcacgtgtggatgcgttagtgaccgcctaccgcgattacgtcttcgctgaagcgaaaatcatcaacgagaaactgcagaaagccggtttcggtaaattagcttaa

SEQ ID NO: 749 - DNA, 2793 bp, Goslarvirus sp.
  source 1..2793: mol_type = genomic DNA
atgaacaaatatcttgccgcgggactctcttcagctgataacggtctcctggtgcttgaatcgttaactgacggtattaattcaacaccgcgtacgaccacccttaacggcgcgtttcttgacgatctcctggcgttaaaagaaacattacactgtgaacagcaagtatcacgtcaacaactgtctatgctttcgttatcgatgccggaagcccttgacggtaaaccgctggcgttatggacagagcttccttccacaaccggttttcgtgaagcgtgtcagatcgtcgataaagccattacgttaatggaaagcaagctgaagcaagaaggcaacggacagctcgtcatattgcttcgacatgaactcgagcgtctggacaaccacaaagaggatggcgaaaccttcaacaccatgatggtcgatctgtctcagcaactcggtgagctacatcaaacgcttcagggggttatcgagcatcccgatgtgatcgaggatatggggtatgccattcaacgtcacgccgacaagcttgctgcagtatggtcgcctgcgttaccaataatcgcacacagccaagcgcttgcgacgcttgtacaagccgataccaacatcctacaacagatgctggatctgcaagcggctgatgtcgatatccccatgagcgtagaaaatcaggatattagcgcattagagagattcatggacggtgatggttgcttactccctattgcgccgaccgattgtccgaccgaatggtcgttaaaagacctattgaactatatcggtaccggggtcttcgcaacacgtattctgcgggatgtttgccagcagtacggtgatgtcgctgaacgtgtaaaacaggttatcgctaaagccgaagggcttgctcaggatagcaccttggatgggatcgcacaactgaatctgctaacccagatgcaatgcgttcgaatcaaatatcagcggatgttcgcacaatcggtacgtgcggccttgctgtttgcacaaacggttggtcagatcatcctggacgttaaagatacagcgattgctgcaaagagcgacgacttctgggataaaacccaggcggaagtagaagctgctgatggctacacacgtatcgatctcgtgcaggaaggtttctttgacccaacgaagatggaagggtacggcatctataccgcagaaagcgcgtgggaaacgttacggcggacaatggaatacaccgtcaatatcctaaaacgtttggttgattggttagttaagagctggcgtaatggaagtgcgaaagcagcgattcagcaggcggaagctaataacagtcagcttacgcgagctaaagacgctctgcttaccgaaggcacgaagaaacgtttagcgtcgctgcacaccgtcggtattcagaccattgcgaaatatgctgaagcaggaacgatctggtcgggagcgttcaaaggggttaccgacaatctgggtaacgtttcggcattaatcagctcggaagtgaaagagctatcgaacggtcgtgaactcgatcaggataaactcgctaagattcgtgaaggtcttgctctggcattcgagaaaggtaacttcaataaagttcttcttggacataacggtatcactatcgataatctcgcaagtgaaatccatgactaccgtgaagaattgaaggatcagttcaaggaatccacgaacgaatctatcgatgtggataaactgattcgatacaacgatggttgccgtaaattcctgcaagggccgattaccgatgcgcgcaacaaggtcagcggacatgagctggataatctgcttaccatgttaaacagcatgattcgtcaacaagcctcatcgcctgaaaataaaggtttaggggctttgaagaacgaaatcgtgaacgcacgcgatcttgctaaagctgcggtggatattctcggtatcgcacaatggttggaagtccgagctaaacgttatattaacgctttgagtacagttgtcgataaagcgaacagcgaagcagcggctgttagcggaacattgaaacaggaagcgttcgatcttaacgaagttgtgctctcgtccaccaattacgatgtttgtagcgtcgcagccacgagtcttgcggcaaacagattccgcaactcgcgtgacgaacttcgtcgtcattataaccaagccctggaggctgcgtttcaagtctataacagggctgtttataaccgtgctgtaatcggacaacatctgttgggtgttatgccgcggtttacgggtgtattcagtaactatccgtggacattaggccttgaccttcaggtgtccaatccttccgcgttaaatgcgttctgtgagaagctttcgcggtctatcgagctctatggtgcaggtactgccgacagcatcacacaggcggttgctttgttagattcaacagaactctgttatgcggtggatccgaactatgaaggcgaatctggtaactcatcggctttagcaacgcatatgttcgaatatcgacgtctggcaaaagaagcgttggaacctcatagcgactttaccactgaagaacaacggcggggatggtacgcaacgttcatggacagttcaccatcatgggaaccggataatactctcccagtggtaacggaagatgttgatccttcgctgatatgggcattcgcgtctttgttctgtgctgcgctgaatgcgtatatcgcactgagatacggtaccgatctcaaggtgtatggttggttcagtgaacaacagaataacactaacgtaagataa

SEQ ID NO: 750 - DNA, 2994 bp, Goslarvirus sp.
  source 1..2994: mol_type = genomic DNA
atgagcgtaaccaacaaagatcttgctgaacagctcaatcgctatatgctttcacctattgaaatgcaggctgttgcaagcgatatgatccgtttggcctctgatggcgagttaaccctggttgaccccagctgtccgtttgtttatctgctggaggttgcaacggcaacggctgcgaaccagaacgcacgagatgagtcccgtgttcgcgaactgtatccgaagcttgcaaccaactggagccagctctatcgttggatgtatgatgagtcgtacgtcggacgtttcgcaatgccgggtaaaacggaaatcatttattcgttagggtatcaggaaatcctcgatcgcgctgtagagattcccaacaccatcgcctccgatgatttgagccgttcttacagccgtaagttagtgataccacgtacgacagcgtttacggtagccggaatggatttcgggttacattatcccatcgaaatccaagtacaagcgcacgaccagatccgcgtcgtttataacaccgataacatcagcccattgcaaaccttggagagtaaccaagttgagtacggggtcgttcgtgtaaaagcgggtaaagtgttggtgatgcgtatcccgctgttccagtttaaaacgctggtaaaagatgtgccgtttaacagcgttcacgggatgaacagcagtattaccttcgaagatcagttttaccattgtcgtgcgtatatgtcgtcggataacgatacctggacggagatagcgacaacgcacagtcaacagatctacgatccgttaacaccaaccatcgcgttacaagtagaagggaacaaacttaactggcgtgttcctgaaatttatttgtctcaaggtacgatggataaaagcaccattcgacttgaggtgttgacgacgaaagggaaaatcagcgtcgacccgtctgattacgacgtgaccgactggaaagataattacatcgatttgtcaccaaaagccgaacagaaatacagtgcgccgctaagtgcattcaacattaaagggatttatagcgagggggcgttgtctggtgggcgatccgcgttaacgttcgaggaacaacgtgaacgcgttatggcgggagtgaacaaaaccaaggtaccaatcacaggaacgcaggtcgagctggtgcttcaagatgcgggttatgggatggtgaccaccatcgacaacgtaaccaatcgttcgttcctggcaacccgagatttaccgcaattgagcgacagcgtgccgcaagccggttcgttgatggggtctttctatacgtcagctgcagcattggtgaaaagtaagtttgtcgctgataacggcgacagtattacgattaaacctgattgcttgtatcgtgacagtaacggaagtatcacgctgttgtcagacgatgaaattgaccgtattaatgcaggtgactctgatgcgaagttgaatgcggtaaacaacgccatgttgttttacagtccgtttcattacgtattagatgcgacaagcgatttcgacatccatgcttattacctggatgcccctaagatcggcacacaagccttcctcgacgcgaacgagacaatcccgttaaccgctatggtgaccggataccgtctggatcgtatcgccgaaggatatcgtctaagcctcattgtagaaggtaacgacgcatggaaagcgctcgacgataaaaacgtgcacatccagctggggttcaatccgcgtggtgagggtgattacgcaacgatgttagcatcgcctacaaccgatgaacaaggtcgtcgtttgttcactttcgatatcaccacgaattatgattttacgcgaatcctggccgatgattccacggcgtatgaaccatatatcgcattgacttcgttctcgatgtatgaatcgacaccgcgggattattgggcatcactgcagcagtatttggaaatattccatgtggtgacggattacgcaccggaagatgtcgacggtattttacacagcgcttccgataattacctggttaagaaactcacgcttcaaaatgggtattgtttctaccgtgaacgtctcaccgcaacctttggttatgatctggatggtctttggatgcgttctcgtacggtagcctcggagatcacgtataaacgttacaccgagaacattccgtgggtgtatgatgaagatatcccagcgacggatgagaccggttctgttatcattgagcaaggcgatgatggtacgttgtcggttaaatatctgcatcgtaaaggagatccgaaattaaacagtgatggaagccaagcctatcgttacctgaaaggcgacatcatgaaagataattacggtaatccgatccccgtcgatgaacgtgaggttctgcgtaacctggacatgttctttattgatgcgtcgtatctgttagcgaacgatacagacgtgattgagtaccgtaatgcgattcctacgcagcttatcgaatggatccagaacgatatcgacacgttcaggaatttctgttatgaagaaacagagatttcactgtatcctaagcaatcgctggggtatgtggatgttattgtggaaaacggattggaaacgacgcttcctgctgccttatcgttcaacgtgacactgtacttaccagctaagcaatacgccgacctggatttacgtcaagtccttcaagcgatggtgtcgaaagtcatcaatgaatgcttgacatcccgtacggtggctaaagcagaaatgatcgcgatgattcgtgaggagggcggtgacgacatccttaacgttgaaatcgatgattttggaccaggtaagaacctcagtgtttataccgcgaagaacgacggtgttcgttgtgcggtgaagaaagagctttatgtgaaagcggatggtatcttgtccgtacgtgaagcgatcgatgtaagttttgtgaaacacgcacaaagcaacagttcagcgctagcgcaaggccttcgtgtctaa

SEQ ID NO: 751 - DNA, 1206 bp, Goslarvirus sp.
  source 1..1206: mol_type = genomic DNA
atgtctaattactacgaccaagctattcaaaccattcaggagaataatgcgtcgttaacacccgaagctgtggaggcagcgggcaatgcggtgttattcactgattcggattgggcaatagcgcggaagaatattcgtaccagtgtcggtcaagggacatacgaggacagtatcgccagacggtatcggaatgtgtcgcctattcctggtaacagcccgatcccgattaaccgcgatcatgccggtattaccttcttcacacgacctaatttacatcttaccgacgcgaacttaaaacgagatcgacgtttgtggtcgttacgtacggataaccctaacagtattcaggctgttgtccgtgactacttggaccctgtgggtgccagaaagcggaaccatcgaggacgtgccatcgtcgatgagcgcaatccattcataagtatactgacggacaacctgacggatatcagcggtttcaatgacatggaaatgcaggtctatcagggtaaaccgggattacgccaagaaaccgttgtgatggctgacggttcagtggatatgttccagccttataacctgaacgcgacgttcaagaacatcatgggtaaccccatcatgttccttcattatatttggttgatttacatcgcaggcgtgcataatggtgaactgacgccaagccctcaggccatcatcgacaatgaaatggattactggacaagatgctatcgtatcatcctggatccgactgggatgtatgttcgttatatcttcgcaccgaccgcgatgtttcctgtcgggttaccgattggtaatatggctaactacagcatcgataaacccttcacgcaagataacgaacgtatcactattccatatcaggcggttggtaacaacgcgttcgatgagattctgaaggatgaattcaatcgacttgtcctgatgttctattacggtgagaacgatacccgtacgttccttgaagatgaggagctggtacctatctcaccctacgagcgtcgaatcatgtcgtatcgtgtcgatatgtatccatttattcatccgttgacctcagagcttctttggttcgtacccgctgatgattacaacgaattctatctggatcttgagccgtcggcgttaccaccggatacgttcagtcgcgatcttgtccgtaccaccattccgcaaaattacgagggataa

SEQ ID NO: 752 - DNA, 1107 bp, Goslarvirus sp.
  source 1..1107: mol_type = genomic DNA
atggtagcatcagaaattgccgacgctgttaatgttgttgcgtcaggtatcgctaaagtctacgaagttaataaacttatccagccaggttcgctggttgaactctcacaaccttcacgcgttatcgcgccgttgatctttgaacgtgagttgtattatagcgacgcacgcaatgcgttaggcaactgcatgcgcaccgctgaaaacatgtataccgggttctatttactggcgttgaataccatcatgcaggtgggtaacatcagtgtcgataaaacgctgggtcgtgtgaacccaaaccgtaacgctaacctgatggataaggccgttaaattagcgctggaaagtgcggatagcaaaagccttgttttccttgatgacaaaggattcaacctacaggggaaacaaaaaaatagcctcgatgttggagccagcgacgcggcgatcgaattgctgaacaaagatgcaaacgcggtcaccggcaagttcttaaccgtgacgctgaccgatggtcaggcaacgatgaaaatgccgttgaacatcagcatgcgtattgcaagctctccagcggaagtgcttgcgtcgattttagcgattggcggcccacagaacacctggcgagcacgttggcatcgcatgatggccggtgagctgtctttctggagcgatatgatcctgcttagcgatctggttcgcgaacacaaacgaatctcacgcatggataaagagggtatccgtaaggctgttaatgctgcgcgcatcaatgccgcaaaagctgcagcgagcacaaagatcccttcttctggagccatcgcctccacctatatcatctctaaggctaaccaggaagccatcgagcgtaagatcggacgtcgtttatctgattataccacacgtcagaaagtcatggctgaagccctcgcaatgcagttgatcatcatcgacgaagctgaagagatggtgaccttctatttccacagcttggatcaagggaccaccgtaagcttcaagcagctggaaaaatccaacagttcgtcaacctcgggttccgatctcctgacgatcctccaggcgctccgtaccggaaacgtcccacagattcgttaa

SEQ ID NO: 753 - DNA, 903 bp, Goslarvirus sp.
  source 1..903: mol_type = genomic DNA
atggcaatcgattttaaagaattcattcgcggtttgaagccgctttttaaacgcaccggtgttgctgacgcacttgaatcaatccgtgacgaaatcaacaacaccgcgattccttactacgagacatccgcttcgcttctccaaaagggagaaagcgccttatggaaacttgctgataaggatctgcaccagcgtttaacccgcgttcgctctggaagctgggtagaaaacgttcacttagcgctacgtaatgctgttgatctgattccagaaattgttaaacgtgttaacaaaaacctggaaatcgatgttgctgctgacggtctgagtttcaaagaagccgctctggtacgtcttgttgagtccctgggcttctacgttagctacgctcgtacgctgcttcgtgcgacggtcatctgcgaaagcatgccaggtggtgataaagcacttggtgagttcttcaccaaaaacgagattgcttacctgaccgccaacatgtacggtttcgccatcgccaccgaggtgctgtgtggacagaaacaacagatccttgctgggttggataaaatcccggatgttgtggtttctgatgaagacggtgttggtaatggattgtacaacgcgggtaatactgacccgatgcgtatgggctcatggtccgacactcaaatgaccaacacgcttatctaccgttatcgcatctggcgcagcgaacgtgaagaagcgtcgttacaagcagccaaagaagaagcccaagcgttggagtattggattttgtcactgaagcaaaaacagcagaatgcgggcaacgatccaaaaatccagcagcagatcgaatatcacgaagagcgactgaagaaacttcgttatgatattaaacgaaaagaagaggcggctgtatga

SEQ ID NO: 754 - DNA, 531 bp, Goslarvirus sp.
  source 1..531: mol_type = genomic DNA
atgaatgcacttcgtgacgtccctttaacgttatacggtaccgggttcttcggatttccggttaacggtgtaaaacgccaggagaactacgatcgtgacgttgttagtttgtatcagcgtctggtcgacggtactcctctcgatgactggaaatatgaacgccaggttctttctaccctttatcgtttgatgtaccccatcaccgattgggtggaaatgaacagccataacccaaatctgaacttcaccagtctggagtttatccgtgatacgctacggttcattcacacgggtagacgagacacgaacgttcagattgctggtcaattgattgataactggtcagatcgtcagtcgttaagttcacaccaacgcctggaaagcagcggtaaacttatgagttatatcacgttgtcagacgaagagatggtgcgtacttggctccattgggacaatggcatccaggacatcatatgtactttgaatgcggtgtttgggcaacctatggcaccgggttttaagggcttttaa

SEQ ID NO: 755 - DNA, 1323 bp, Goslarvirus sp.
  source 1..1323: mol_type = genomic DNA
atgccttctatttttgatcgtcttgtcgcaaatccatctaacgcacagctggttcaactggctgctgagatcgacccggatgcagcggcaaccgttgaagcagaaccggcagctgatgctgcaccagcggatgaaaccgttgtggctgaactgaccgaacgtgctgaaatcgctgaagataccgcagctgaaaccgaactggctatcgaagttcgtggtgatatcgagcaggttgatgctgttgttatcgaaattgcaaaagacgacgaaaccgcagaagccatggacgaagccatggatgaactgacggaaaccgttgttgcaaccgaaagctacctgaaagacggtggtatgtctgcacagaccgcgcaagaacacatgcgtaatctgaaacgtctgtgtggtactatcggtttcaaactgccggaaaccatgccttccttcgaaagcttcggtggttccgcttcccgctacgatgcaaccaacatgatcttcctggaagaacaaaaatggtggcagaaactgtgggcaaccatcaagaacttcctgaagacttcctgggaaaccttcgtgaagttcatggatcgcatcttcgacggcgcgaccaaactgaaagcacgtgctgctaaactgaaagaaatgatcgccaagcgtaaaggcgctgctaaaaataccaaagttaaactgggtagcggcgtttctggttacatcggtggtgatgatctggttaccggcgcgaccaaaatcgctgacaccttcgagaaagcaatgaaggctgctgacgatcgtgctgataaattcgttggtaccgttgttgctaaatctcacaccgagtacgctgataaactgaacgctccggcgattgctgacgttgctggcccggcaggttggggtttcaaagccaatgatggtaaagtaacctgggaacgctctggcgaagcaaaagaagttgaagctaccgtcctgtccctgaatcagctggctgctgcggttagcggtgttgaagcactggccgacaaactgctggcgctgaaaggcaacatcggtaagaaatcccagggcttcaaagacgctgttaaattcggtgacgatatggaagccgatctgtctaagaaaggcgaagtttccgctcaggaaaaacagcgtgttcaagctgtactgtctgcactgaaagacgcacgttcctgctacgtgaacccgcagaccggtctgatgaaatacggtgttcaggcaggtaacgctgtcctggatggcgttgctaaaatgctgaaagagtacggcggccaggcggctgagaaaccggctgacgcagcacagcagtaa

SEQ ID NO: 756 - DNA, 1317 bp, Goslarvirus sp.
  source 1..1317: mol_type = genomic DNA
atggtacacataccgctatttgcgacccagggcgatatcagccttgaggcgtttgaaaaagatcctattgttgctgaggcgcttgccgtggagcctaccactgaagtcatcgacgccgatggtgttgaattacgtttagcgacaatcgacgaacatgaagatgcacttgatcgtgctttccctgctgttgctgcactgcgggaaatcagttttgatgttgctccgactatcgaatcggctaactacagtgacgttgcattagttcgtaacgttcaagaatccgcatcgattgctctgggtctaccctccgaagcattgctgaccccaaccgatcgtgttgaggttggagaagctttggttgttgaagggtttaaggacaccgttgtaaaagccatgaaaaagatctgggatatcatcgttgatattgccctgactctggcagcagccttcgagaagcttacccgtcttgtttacgacgagacgcgcaattttcagaaagccgttgcagacctcgaacaaatgcctaaaggcaaatacgaggaaaataaagaagttgcgtttaaagcggagtggcggacacttttccctaaccgtaacaacgttggtggtgtagacgcgctgaaaagcaacattgataccttcaatcagatgttccttaaatcggacggttattcagttattgatgggttagggttaaacatcatcgacttccatttagataaggttgaaaaacttcccgttgattatctgactttcttgaacgctgtcaaatcgacactggaaaatcgcggttctgtggaaggtactgacgttatcactccaacggtttccggaaaacgtatccgttatgtcaacggtgcggtcttcttgaaagaattcgatgcgtcaaaagacaatatcatcgatgctgttaaacgttacctcgacttggatattgtcgttgaagatattgaatgggatagtgacccggaaacgtacgtcctaccgacacctgacgatttgcgtagcgttcgacaactgacgttcgcgaaagatctgttgatggtaacaaaacgtgggcgtgctttctctgagatcttctctcgtaataaaatccgtaccatggaacgcatccaatacgttaccatgaaacgcttcaacgagcagaattttgatgcgagctaccaaccgtacgttgagatctatcctaagctcgttaagcgcgcgattctgctttgcggtaaagagaaccgtattgaaaaccaattcgcttaccaatatcttcgtgcattgacctcatttatcaacactctcgttaaagcttataccaaaggttaa

SEQ ID NO: 757 - DNA, 1290 bp, Goslarvirus sp.
  source 1..1290: mol_type = genomic DNA
atggcccgcatctctctttttgataacgtcaataaaaacgcattcgaactcgcactgctcagcgccgaagatcttcttgcggcaactccagcggagcaacacgatcctaacgcagaaatcgaagaggacgaagttgagttggtgattcgacgtaccgacgagacaatcgatgaatccagcgaactggctgaaattgcggtgcgtacctcagcaacgctggaagataccgcgtacatgatcgcacctacgatccctgaagcacgtgcgagcgacatcgcccttatccgtcagattgcttcgacgtcagcggctaacctggggatgtccgatgaagacatgttccaagctgacgattgtttggtggaagggcaagctattgtgctggaaggctttaaagaacgcgcagcacaagcgttatacgcagtttgggtaatcattgcgaatatcgctgagcaactgttcaaactgttccagatgttgttcaagaacctggtcgttgcatacaacaaaattgtcaagatcgcaaccgctgtgaataaaggtgagcgccatatcaaacagttggataagcccactggaaatatggtcaatatgttccctaatgctaaatcagcgaatgccgtgtttgcaagcaagcatatcgaacaactcgctgcaagcgcaagcgggacggattcactgtttaagcatgtggctgatatcaataaaaaggtcgcagacctcactgacctcacactgcttccgtctatcttagacaaatacctgctggcgatcaaatcagctctgaataaagttgtttttccagagagcggtgggaaggaattcgttattcaaggtctcgacgctgttgaaaacgaacgtgatgcgattaaagcctatacgttggtgaaaaatattcgggttgaggccgagatgacggtggccggtgagatagagaacgcaaacattttcaaagacgataacgaactgaaaggcgcattgacttcctatcttaacgtgttccgtacgatagactcctcttatttccacatggttgaagctttggccggttctgtggagcgtaccgctaaactcaacggtatgaaaatcaaaacgaagtggggtgatatgctcgacaagctgcctgaagccgatcgtgaaaccatccgtccttatgtaagcgcggtttctgaaatggcgcgcttaagtactgtattgtcaaccaagattcttcgcgcttcgatacgccaatatgcggatgctgtatttgctgcagcgaaatacttcgacgctgtaaccgaaaaagcataa

SEQ ID NO: 758 - DNA, 1302 bp, Goslarvirus sp.
  source 1..1302: mol_type = genomic DNA
atggaaaacgtgttacaacaacccatgacatcgttgtttcaagggattgatgatgaacctgtagaatcgttcggtatcgctggcaatattctcgatgccagtaatattgagaatcagtttcactcaatcgacgaaacaaacacggtgatgaaagaaggtgaacaacaccttcaaacattaaataaactcaggttggatatcgtcccaaacatggctgaagttgaagaacgcgatattaacaccatcaaacatatcgcatcgaccgcagcagccggaatgggaatggatccaaaccacatcatcgagggtctggaagaggaaacttccagcgggatgagcttgaacatggaaagttttgacaagaccgcaaaagaagcaacccgagcgttatggctttacatgaacgaattataccgctacgcgatcgatatctgcaatcgttgttatcgtcgattcgttcgtcaggtgaagccgttattaaagaaagcggctgcgttgaaaactatttccgaatacgacgtcgatgaagataacgcattctgggagaactttccctacaactggcgatatcttcatccgaaaggcggtgcggtaagcagcattgctgatttacgacaaaccgcagaaaacatcgtaacgaacacaggaatcctcgcagcatggcatcgtcaactcgatccgttattaatgcagctactaaaagcaccatcagcggataacaaagaaggtatcgctgcagaaaacgaagcctgttgggagaatatcctcgaagtcatcaacgacgcgttatgcgagaagccgttaaagcctaccggaacagacgatatcgtcgttgacgcacctgttggtgcttcctaccttaaattacacaacatcgaagacgcaacaggaacacaattcagcgttgtgtgggaggctgcaccgttccaatcagcaaaagacggattccgtttcttaccgttgaacgacgttatcgacggaaccaatacaatcatcaacgcattaagtacattatggtctacgctacgacagttggaatttaaacgttgtcttgaagcaggccttgccgaccaggacgaatggattcaaccttacgagcgtttactacaacagatggacaacgacgataccaccgcatccgctatcgttcaacgtgtgggtatcgcgcgtaacgtcgtcggcttccaggcggttgcttttgcccgattcctgttaactgtctgcgacgtcatcgacggtcttaatgattatcttgacgcgcatctcgaacttgaggaaaccagcaatgctgcagacctatga

SEQ ID NO: 759 - DNA, 1149 bp, Goslarvirus sp.
  source 1..1149: mol_type = genomic DNA
atgattatcttgacgcgcatctcgaacttgaggaaaccagcaatgctgcagacctatgacggacagattcaagcgttaagcttgttaaaaacattacctgtgccagagacagcaacgcaacgacaaattcaccagcttatttatcagcaagcaggcggtattccggcaaccggttataccacagaaagtgctgatctcctcacgatggaatcgtacaatcagcttgcgatgaaaatcatcaaagccatcatcgatgcgatctggacaacgttgcggaacatcactgcgtttatcgcccggtttatcgatcgtagtcgcgcactacagctcgaactcagcaacatccgccgtcactacacaaaagccgttggtcgtaaacccatcgcgcaaagcttcgaagcttcgtcaacgctggcaccgcacctacggtatgggaacagttttggattcgacttcacaactgggaatacgttatacaaacagaatttggcaatcgctgaatatctcttgtcttcgtcgttccgtgatgatttcaagcagttcgctaatacgttagatagagcgctcgacattatcttaaaacagacggataccgcattaatcgatgtgattaaccgtgacgcgtatacgttattgcataaagtctacagcacgctgaacgaatcgagactcgtcaatgtaacgttactgggtaaccgtacgctacgactcgatcaggttaccgcttcaggttctggttcaattcaacagtccctcaccattcaatccgcacggtttgaagtccaggatgtaccgtcagttgaacgggatatggtggttacaatgccaacattagaacaagttggtgtgctactcgagtcggtaaatacgggtgttgatttactggttagttaccatcgtaaaaagtacgccaacgagttactcgaaatcgcagggaatctacaagcaaaacttaacgacgtttatcgtcaacaaggtcagttgtcagttactactgcttctgatgatgctatggtagccctttctcgataccttacagcgtataccgcgtggatcaaggtgccgcttgtgggctatgccgagttctttacgaattcaacagcggctatgcttgatgtctctcgcgaggcgctgaaatattacttttaa

SEQ ID NO: 760 - DNA, 3378 bp, Goslarvirus sp.
  source 1..3378: mol_type = genomic DNA
atgaaaaaatcgttagctgatctgatgcgtaagtcgcatcttaacctggaaagcggcgatacacctatcgaagtcaaagcaacgctttctactgataaagaagagcaagtgatcgcattacctacagcggcacggccagacagcatcgaagcgacgatcgaatcagatacgctcgaggaaggggctaccgttgatgacgctgttcgtgtgattcgtagcacggatgagaacggtgaggatgtcgtacgtgctgttattgtgacccgtcctattgatggtagtttacgaattcgtttcacaccgagcaacggtggcgtaaccatggaagacggtaacgatgttcaaccgttcgttctgatcgcggtaccgaccgcacctggcgaagagccgaagaacccgtatccggcaaacgcaccgaccgaaacaccggcaccgaaagtgaccaacgacccgaccgttaacgctgaccgcgacaacctgaagaacaagattcaggatgcggctaacgccatcgatccaaccaatccggcgcaaatcgaacaggcagcgcaacctgcagaaaccaccgaaggtgttaaaggtaatgtcgtcgaaccggaaaaagcagaacctgttgctgaaacagcggctgcggcaaccgaggtgacgccagaaaccaaaacaacggaagaacccatcaaagtcaccgtgattaaacgtgtcgtggagaaagtagaaaaggttgaagataccgtcgctgacgaacaacctgttgtcgacgctaatgatggtaataccggcgagcagaaagccgaagcagttgctcaggaaacagaactgcaaggtgatgttgatgtcgataacactgacgggtcgtccacggaggacaacaccaccgaacctgcgtccgaagaacctgctaacaccgacgctgacgctggtgccaccgacgacacaaccaccaagggtgatgaaaacaccaaaggtgacgatgatgaagacgacgaaaacgaagaagatgaagatctgaaacaagagtcgttcgaaattcatcaagagctggaagcccgtggtgtattagatgttcctgttgttgaacagcgtgcatctgttattctcggtgagggtgaaacagatgtaaccgtcattgaaacagaacaaccgtacattcctggcaccatggtggtacgtcgtcttgatggggataagagtgttattgttcgccgtactcgttacgctgaacgctttaacgctgatggtcagggtgaagcgatcgccattgtcgaccctaccctgcaaggcgaactgaaaatggaattccgtccggctgaaggtccgatggaaagcttcgagattcgtcctgaaatcaaagacgaatacatcatggaatcgtacaaacagcttgatgtcgcactgaacagcgatctcaatctggaagacggggaaaagcagccgggtcgctttaaacagattctgaaatcggtttacgaagcggtcgcgaagttcttaaaagccctcgtggcgcgtttgaaaaatctctttggtgttaataagaaaaaaatcgaagagaaggccgacaagctgaccaaagaacaacgcacagcaccagtgatgaaactgcttcctccgccgagcgacaccaagaaggttgacgttgagtggaataaactggatacgctgctcgcaaacgactcgaaatctgtcgataagatcgtaaatgcggttaaagacagtaaacgtattgcggacgcgtcgaagaaatatttcgatgagttaaagaacagcaaggaaggcgagcaagttcagcatccagctgaaatgaaagcagctcttggaatggcgggcgtgaaagcgttcggatattctatcgacgatgtgttaaacggcattcgtgagttccgtgacgaacttagcgccatgaaacaacaggatgatgctgtgccgtccaacgttagcgttgaaatgctgatcggtgcggcaacgaaactgtttgacgaagacctcctgaaagcagttactcaacttcaggagacggctgagcagttactccgcgatctggacaaagtggaaaacgaatcgggcgcacgctacgtcacgcagcgcacacgtaccctgatgaactttgcaacgaccgcatgcaccgtttacggattcgctgcaaaagaactcggcgatgttaccgttcgtatactcaccgctgtcgcagcggctgataacggcgatctcaaacaggaagaataccaggatgttgctggtgaaaacgatcctgttgtcaccatcgaaacactggaaggcgatgccggtacacgtgttgttgccgaggcggaaatcgttgataatcctgcggtggtggaattcgttgagcgtgctgaagaagcgcagcgaaatctggctatcggtcgccacgcggtgagcgcggtggaaggtattctggtagcggcacgcgagatcggtcccgataacttccagggtaacgtcgaagctaccgaaattgcgatggaaggattcatggataccgttaagagcgcggttaaccgtatcggtaactggattgaaaccaaccatcgttactataccgccgctacggctccatgggataagctgttcgccgaaacacagcaagcgctggccaaagcgcgtcgcggtaacccagcagcagaacggattattctgaaacgtttcatccgtcatcttaccatcggtggtgaacctgttaccgatgtgaagaagctcatcgctgcgttgggtgaaatcaaaatgcttggtaacatgacgcgtgaattaatcgttgcgatcgatcgtgagctcagcgacgtgcggaagagcaaccagtccgaaacatccgctggatcggttgttggtctgaagcgtattcctattcagaaatgggataagctcatggtcgctaccgtacaaccgtggaaagacagcgatcgtaaaggtgttgggtccaaagcgtatcttggtgaaacgcacatcgtgaaggtgagcgcgacttatgcgacaacgcgtaacaacccgaacgaggaagcagcgaaactgatgcagtggatctacaccggtatcaatcgccagtttacggtttctgacgacctcaccagtgaggaattaccggtagctactatcagcgaactggaggcagtgctgcgtgcggctcgtgaagcacatgaagcttggcttattgctgacaacgccatgcagaccctgcgttcaatcgataaattcctggatagcgaactcaacgttgagaacgatgttaataatgtcgttaactacggtattgttctcggcctggaagattggttgttccatccggcattgacgttatggcaacagttcaataaaccgatgcaagcggtgcttttcctcatcaaagcccattgcggtgcctacaagtaa

SEQ ID NO: 761 - DNA, 111 bp, Goslarvirus sp.
  source 1..111: mol_type = genomic DNA
ttgcggtgcctacaagtaatccgtacgcataaacagcccgcccttcggggtgggctttatgctgtcgaccatcatgtgatatcttatctttcaaacaggaatctgcgatga

SEQ ID NO: 762 - DNA, 384 bp, Goslarvirus sp.
  source 1..384: mol_type = genomic DNA
atgacacgtgaagcaaaatttctttcactcgcacttaacggtgcgcagcaacagacatgcttggtagcggcgtgcccgcgacattcagtacccggtatgtatatttgccgtattaacccacataccgcacacgaaaccgtcgtgcagattcctgttgcggcactaccggaaggtaccatcaaaccaatcatccaaggattgccgttagaagcgctatacgctgttttaaacaacgaaatagaaacattaatggaaacgtccaatgaaacagataaaacgcgtctagggctcgttaaagagcttctacagagcagtctgattcattataccggatatcgacaacaaggaggtgaggaaattagcgaggacgacatcgatgcctaa

SEQ ID NO: 763 - DNA, 1566 bp, Goslarvirus sp.
  source 1..1566: mol_type = genomic DNA
atgcctaaacttgatcgaaaaatcaatgacgtatacgcgacggtaacacgtccggttgcaatcgcggtgttacggcagatcagcgagctttgcgggtgggattataatcgggagaacattctttttcgaggggaagcacttcacgctaaaatgagcgctgcgaacgagcaaccaccgcaagttgttgatcaggatgtaaaggggcctgccgacgggtttatccaaattgagcttaatattgtccccgaagaacaggcctctatgtacgataccgtttacaaacgaaacagtcttcccgtatttgaagaccgtaaccttggcgtatcgttagtacctgtttacagtacgatggttgcaaccatgcagatcaccaaacggttcgaagatcaggtcactgccgaacgttggtggtacgacatgaaacgtttgctgacaagtcagcatgtcgccgcctttcttagcgctgaatacagctatgcgatcccaacacagtttctcatgttgttaaaagttatccacacacaccgagaagcaatagcgggttacggggataagttcagcgaataccttagagacgggttcgacaaccgcgcaaccaccatgacgacagttgcaggtgacggtaagagcgttaaattggttatcagggaaatgcaagaagagatctctggtcaatttgatttcaccgacgctccgaaacccgagaagaatgagaacagttcttcgtacaacgcaaccttctcttaccgttacacatacgacacgccaacacacatcgtagcgcggtatcctgttcaagtacaccaacagatactccccgaagagtacctttacaaaccgagcctctcggtgcgcgataaatcccgtgcgcgtcgtggtggtatggtggtgcagtatcaggacattcttcgtgattcgttcttgccggaacagggtgcatcgattcaagcgtatcggtatcctgatttggatgaatggttgcctccatcgagcgtggaaaccgagcttccatcaagcacgcttttcaccgcgctgcttgccatcgatcctgaacaacctaacctgttggtgacgttggactcgttagccgaagaaggtgaattccatcccgatcttgttcggtggttccgtgagtacccagaatggtcaaaatgccattatcaatctccttttttccttgaggtttggaagggcaaataccgctacgcaagagacgcgtggacattaaccgacgttggtgatcttgaagcgaaagatccgttagacttacggagtgattaccacgttcgtctggcgatactgttagatttaagtcagttacaggttgaaacacttgaagcgttgtgttgttatcccaatctggtggatgagctgtttgcagtattaggtctagataaaaagtactggcctaagaagaacagtcgggggtgctatacgctaatcgggcttatcgaagccatcaaacgtatcccaacaacagcttcgtggttcaaacatcgtagtttattcgtaccgagaattcttgtcggtaccatcgtaggagtgaaacgctatggcgctcgctaa

SEQ ID NO: 764 - DNA, 1317 bp, Goslarvirus sp.
  source 1..1317: mol_type = genomic DNA
atggcgctcgctaagaagcccgcgaaacccaccatcaacccccaacaacccgcgaaggctcgcgacgatgtttatcgttctgcggtggtggatgagcaatacaatagtcaaatcgggttagtgaattacgcatccggttattccgtagaatgtgattattacgaacagattctcggtcgcgatgatgaacaaagcagttttcaagctaaccgagacatcgctgaacagcagtaccgtcgcatcagacattaccctatcaagttaatgtcgtcattgacgccgtcgtacgacaacgggaccgcacgttttcaatccgagggtacgtgtatacttccggcggtatcggttcctcttttaggtaacatgctgttaatctccggtctcgatcatcgtatcgcggtgtacacgatcacccgaatcacgccgaagaacattagcttagcaccggcttacgaatgcgatatttccttccagcgtattcttgacgaaaaacagcttatcgaactggaagcgaaaatcgttgaggatacgctgtacgaccaagaccagttaaagcacggaaaacatcccgtaatggcaacggagaaatacaatcgtaagtatgattatctccgtcgtgcgctgggactttgtcacgcgtactaccatgaattctacagccgtgaattaaacacattacttgttcctggtcaggatgcggcaacctacgatccctggtgtgttaacgcgtttacgaaattatggtcgtcgcttgaaggaaaaccttcatggaacttcggacgtcttaacgtagacgacagccaggaagcgaatgcgatttctgtctttgaatgggtaatggacggacgtcgggaagacgaggcgcggttgacggtgaaattcacactgttgtcaacaaagcgtttctatcagtacccggctgcaggtgggattcgttttagtggtgcgcggttctgtatgtggcctgcgaccacgtcgctcggtgaagacgtaggtaaagagttggctgtacctgaaaacacaccaccgacaaatccgttggtgaccaaccttacatcgatggagtatgacggcgttccgttgtttccatctgtagcggacgatccgtactatgttttcacagaggctttctatcgcaatcaagccccaatgacaatcattgagagtatggtacgtgatatggtcgatgagaaagcaatcagtcatccagcactgaaacagatggttgacgcattaccgttgctttctccgctggatcgttattatttcacaccgttcgttattatgctgttacgagcaggagctattgaaccatga

SEQ ID NO: 765 - DNA, 606 bp, Goslarvirus sp.
  source 1..606: mol_type = genomic DNA
atgagtctacaacacgttaaagataccccaaccaaacgtctatttgaacgtaaattcgaattctggattccccgtaaattcatggtggacaattacaccaatgaggtcagcggcgtctactcttcaggggttgcagaaatcgacgatatggccatgaacgaagaggtgcccgcacagcttaccgtaccgcaggctgctgaaaaacattctcgtggtgttcctatgcgtattgcaaatcctgacgtgaacgccatgaagatgttcatgcttcttctggaacatacggaatacgttaaatacaatctcgaaaacgaccctaacgcgcgcgtaccgtctctcgaagccagccgtatcctcgaagagttcatgggtggtctgtggaacgttgcacgcggtcgcattaaagacccaaccgaaatgagcggattatcttcacgtttacgtgaaatcggtcagcgccgtaaaatcggcatcaaccgcgcacgtcgtggtggtctcaatgcaggcccaaccgttgaagagcaactgcaagcggttcgtcacagcgaattccgtggtacgaagatcgaagaattcatcattcaacaacagcaacggggtcgttaa

SEQ ID NO: 766 - DNA, 1368 bp, Goslarvirus sp.
  source 1..1368: mol_type = genomic DNA
atggattacaaacagacgccgttaggacggtatatcggtacatttgcgcaggaagcagttgctgttgcgtataaagtcaccgcggaattaatcacgccgtcaatgacggtgtctgttcctttagtgactcaagtccacacgtatcgagactatgaacgtaacgctggagatgaactctatatctctgtaaagttcccgcccggcagttacggaaaatacattctaccgtaccaacaacaacttaaaatgcgcatcatcgtgcaggcgtacagcctgatgcgcggacaacgccaaaccgtagacgatgccgcacaagcttacgtctaccgagcggtttgtttaacaaccgtagacagtcgtatgtccgctaccgacgaacgtaccgcaaccgattcttcgaagaaagactacgaacaaatggtcgatcttcaatttcaactgttcgatcctgttcttgaaagcttcatgcaatcagaaaccggtgagaactatactgggtcgaaagtgctggatgtactgcgacttgaattcagcaagatactttctgcggttgaagctgacaccggattcaaaatgcagggtgtggatattgttgcaccgaataacgacaacccattcaagttgcttattcttccacacggtaccaatgcgatggatctcgtagataaaatacagaaccaggtcggtatttattcagctgacgtcggttgttattatcaatccccgtatctgtatatctaccccttatacgacgaaacccgtttctctgacggtcggcgcacggcgatcttttacaactatcctgccgatatgtttccgggcatggacaagacctggatcaatcgtgacaaatacgtggaaattgcgtgtacgagaggggcgtcggtaagcgacatcaataacgcggcttcgttgttaggtaatgcgggtgggcgttttgtttcggcaagtcagatgagtcagggaatgacattatcaaaagggggtgatacgatcatcagtcgtaccgtaaacgttagcgagtacgtaactgaagaacgtagcgataacgtgaaagtggcgaaagggatgggacgcgtaaccgataaccgatggcgtgaattaagcaatactgccggattacgcggtagaacgatgcagttggtgtgggagtacgcaaacatggatttgttgtatcctggcatgcccgctaaagttgtgtggatgcaggataacaatctctgcgaagcatacggggttatcatgcgtaccgattgcgctgttacaatggcaggttcttctgtgcgtgaaccgcagtggacatgccatggtacagtcacgttatggattgcaccagaaaaagacaatactgttcgtccaaccgtttaa

SEQ ID NO: 767 - DNA, 981 bp, Goslarvirus sp.
  source 1..981: mol_type = genomic DNA
atgccatggtacagtcacgttatggattgcaccagaaaaagacaatactgttcgtccaaccgtttaatattccctctcccttcccttacgggttgggagagggtcatatactgtctaacccagtttatttcgcgactatattacctaggtgataacaacggttactgttatcactgtaaatttctcttaatagccgaggatacaaacatgacagatatttacatcaaactggctgacgacgctcttgatacattaatggctgactaccaggtcccagaacaaacggatagtttcaacgaaattgttgaggcggacgaaggacgacattggatattttctcctgtggaaaatcaatcgcgccttgggtatcgtaccgtagaaacatttaaggtcgctcgaatctttcacgctgcaaaaggcaacgcgtatttcgtttacgtaactcaggatcattccgatgaaccgggtcgcctgataaaactcgatgcgtacgaagctgaacgtaagctcgaatacgctctcaacgagattcgtccgcgaatcacaaagaaacgtcgtagcaccggtattctccgcgatctaccaacgatttatcttgaagtcgttgagcttcttagtcgtcgagatacttcggaacctgtcgaaacgaacaagccgatctatattcatcctgaatgccataccacgtacgatcgttacttaacgataacaggtggtgtagcagcgccatcaccagtggatatcggtgagtggagaatgattcgtgagatctatcccgacggccgtatcgtgacgttttgcggtcgcacctgtctaccttgcgatgcgttgaatgaaaaagtcctttccgcttatttctcaacgctaacaaattcccgacagttctatgcgctcgtcgtcgattcccagaaagaatccatagccggtaacgcgggatcgtactccggctatcctcaccatttctacgccgatcctgagtaa

SEQ ID NO: 768 - DNA, 903 bp, Goslarvirus sp.
  source 1..903: mol_type = genomic DNA
atgaccactatttatcgtgaattatccgctgaacaacaggcacatttcctcgcaatgaaacaacgtttggtggacaaaacagaacttttaaacaagacgaccgatgagtgcatctgggtgttatctgacgacgccaacgacagcctatgctccgtatatatcgaatcaatcgttttcttcaacgcactgcacaacgacaataacgcaatcttctttctcaaagatcccagcgttcctggggggatctcttatcttacaaaacctcgcgaacaagcatgcgcgagtatctttggattactcgaaaacctgagaatcaggtataacggaatgctgacaaccgttcctgatctttacgtcaaagcaatcaagaagtactatacgaaagaacctgtaatcgacttaaagaaagaatttgacaatttcaaaaccgacacaccatcgctctcgatagagaaatgcgacgataccgatagaacggaaatgacaggacctatctatcgtcatccttgttgttctgaagggttcgatacttaccttaccgttacaaccggatacggcaatacgccgcccaaagacgttcttatcggaacatggtgcgtcgttcgtgaagtttacccagacggtacaattattaccgccgatggtgatagactcgctccagcgataaacacctacgccgacaccttcaaaaacgaaggaacgttcgaccgtcaaaatttggtttactacgtactcgcggttaattcaaatcgtccttctcaacaaggtttctcatcaacaaggcaaaatgcgccatacggctatcatccacacaacagcatgttcaaccaatctaacccgtactacgatacgattcaacgagtacaacaacatgtcagtccttgtaactcgaagactaagtaa

SEQ ID NO: 769 - DNA, 570 bp, Goslarvirus sp.
  source 1..570: mol_type = genomic DNA
atgttcaatccagaaatcatgattctcgatccttggtacctcaacaaacttccaggaatcaaaatgccaggcgatcctcacgcattcgatttgatggtcgttgccgaagttaccagcaatacggttaacactatcgacgatgatgaggttcctgttgaagaggtgttctctgttacgacgacattactggaaagtcgagagttgaccgaaaacggcagcgccgatgaaatcattcctatcgatggtgagatggagatcatgttaacgcaggtcgagttgcaacatcgtgtcgcaccaacaaaagacacgccgtatgacaatgaacctgcagaacaacctgatgaaaacggtcgagtgaaacttgctgacatcgacgacgatgctctcgaagagatcgacgaaaacgaagaaacgaacttctaccaagctgaagcgaaagaagcgtttgataaagcggttcagcatgatcgacgtatcaccgagaagatgatccagcaacaacttatcggtaaacgtcttaagctcgaattcgcaagcggggtgcttactacctggtcactcatcgtctaa

SEQ ID NO: 770 - DNA, 402 bp, Goslarvirus sp.
  source 1..402: mol_type = genomic DNA
atgtttaatattcttagtgtaccgcgttcccctgtgagttcttacttcggtattatgaccagtaaagaacacaatgtggaatatactgttatcgctaaagatccatcaccgatcaacgtaacgtttgctgaaggtactaccgaactcgttccgttaaacggcgaattcagtaaacctgttaacggcgtctatgaactcatcactcgcgatccgaataacaacgcgacataccgtgtggtgtgtgcgttcaacaataacaaactggttatcgttgcggatagccgagggttatcgtggatggctgaggaaggcacacatcgttactacgaagagtgcttacgaaccgcaggcatctacgatctggtaatggacgcccgtgctaaaaacgaccgtatgttttaa

SEQ ID NO: 771 - DNA, 327 bp, Goslarvirus sp.
  source 1..327: mol_type = genomic DNA
atgattactcgagaaatcatttacgacgctattatcgaatgccgtcatcgcgtcatgcgtggaacggtgtataactaccacttaaacaacattatcagtgaatgtacggcggtgatgactagcgcgctgggtaaacctagcgctatcgcactttatccaaacatcactgaacaggagcaaatcaatatcgaaaaccaacgtcgagtgaatcgccaatacgatgtaacagccatgcacgcatggcttatcgttgcagcgaaactcaacacgcttctcaccgagaacggctggaaattttcacctaatgaattcatgacaataagttaa

SEQ ID NO: 772 - DNA, 1611 bp, Goslarvirus sp.
  source 1..1611: mol_type = genomic DNA
atggacccaaaacagatagccattaagattattacgttactgtttcgtaatgcacaattgaaccatcccgatcccagtacgatcgaacatgttaaatccgtcttagataaagtcgaacccccgaaaaaccatctcgctacagacgtagatagagaggttttcaacaacctgatgaataccattcattggatgttggaacaaccattatcggaacctttcgataaacaacagttgttacaaaggatacgtttggattgccttgaacaaagcaatctttacgagattcttgccgacggactgtacgatatcgaagacgacgctcatatcagtaaggtctgttcactctattacaacgaattacgtaatctgattacccgtcgtcgtgttttcgaaacctttagaaacacgtacatggatatcagtaacgggcgacttggggataaagaatttttcgatgcaatggcgaatctgaaattatcgctagacagtatcgaaatggataccgaaaatcccgaagagatgtcgtgtatgattgacggctttatcgctgacagcgaagacgatatcgagaaagtcgaacgtatgttcgtcaaagcgatggaacgtaacagtcctgaaggtggatttgtaaccggctggcaaggctttaataaaatgttggggtcggtcggtgttttacgtcgcggtaccttaggactgattggtgcaatgcagcaccggaacaagtcaggcgtgttgttaaaactgttcacacatctggcattgtacaacaaaccccatttctttttcccggagcgagcaaagaaagcattactgattcatttgtcgacagaaaacgaagtggaagaaaacacgcttcagatatacaagaacatgcgagaacaggaaacaggcgaatatgtcgatattcgtaagattgaccctcgcgaggcatcacgttatgtgttgaaggtgttcaacgatgcgggtttctctgtttgtatgcgtcgtgttgatgggatgagttataaacaactcgctaatctcatcgaccatttcgaacgcatgggttatgaagtcatggcgttgttcattgactatctgaaaatgttctcatcggaagggctggatagaaatggaccgaccggcgcatggctccaagaactcttcaacaaagtccgtaacctctgcagtgttaaacgtattttaggcatgaccgtacaccagctgtcatccgatgcgaagatgcgtgcacgtgatggcaacgatgaagagtttgttgaccaagtcgcaggtttaagttactgggatggttgtaaagggattgaccgtgagattgaccttgaagtgattgttgatatcgttaaggaaccgggcaaacgtcaaagctggcaagtctttgcattagggaaagaccgtcaaccggataacggttcaacgaaacctgaagacaaacacttcgcaatgccattccaaaccatcgggatgcttcctgatgattacggtaagaaagcagtgtattgccgcaaggttggcggacaacctgtctccgagggaggtaaaggtccgtggaacaagttcgatgaaaacgcagcaccgagtaatgaattacaatttgatttagaattttaa

SEQ ID NO: 773 - DNA, 621 bp, Goslarvirus sp.
  source 1..621: mol_type = genomic DNA
atgaaggaactccgatatctcgtcgttccgaattgggtagaacacgcgattattcgaaatgcgcgtgatgacttacaggtgttattagaccctaaaagtcttttcggcatactatcgcccaatgatgtaggtttttatttcgcagcccagaacgtgcctttcttcatcacgaaagaacacgaacaaacgaaccctgcggttcatcttaacaacctgcttggtggtatgtttgcgtatcactatgacgaaacaggtttgccgccagagaagaatgttgatgtgctgtgtgagtacatcaatcgttatgacaatggttattaccatttactgacgagctatccgcgtgatattgaacgtcgtttggcggatccaacttacagcccagacaaacgtccgttgagtgttcgggtgcgttatgttaatgaggatgtgatcgcgattgttgtcgattgtcttcctttattggcagaagagttattgagcgatcgtattgctgataactacagcgccgttattgaacacctgcgaattaatatgagtcttgcggaagttgcgcaattgccgctgttccgttcatattgcaccaatcgttccatccattatcgcctgcgtcgtttatga

SEQ ID NO: 774 - DNA, 114 bp, Goslarvirus sp.
  source 1..114: mol_type = genomic DNA
ttgaaagtatcctttacagaattaacttatataagtcggtcgatagaccatagcgtacacgcgtgcatgcgccactatagtatcagtaaacacttaccgttattgaggtcgtga

SEQ ID NO: 775 - DNA, 2301 bp, Goslarvirus sp.
  source 1..2301: mol_type = genomic DNA
atgaatgtccggtgcaatgaaaccatccgcaacgttgtcgtcaagaatatcatccaacgaagcagctacggtagttcagttagtctgaacaggcagcttgatgttttcagtgtagaccttacgcaggttcacaacgttaatcagacccagcagcgggcagttgttaacgaagcggcagcgcggctgaaccatggtttctttagaaacctgaccgttacgggtaacctgagcaacagataccagttccggtacatacaggaacataccgaaggtcagcggatccggagaaccctggataccacgagacagggtcacgaagatcttatcgcgcagcatgacgttcgggttatctacaactacgaagttgaagcttacaccaacggtacggaaatcaccatcggtctgcaggaactgcgggatgtagttgtcagttgctactacgcaacgcggtttctcatcagcgttggaagacagcagctgcagagctggctgataaccagactcggagtacatgcggtatgccatctcacgaatcacgttcatgatcgcagcagacacttcagcacgacgttctgcagtggtggtaccctgaacagatttctccaggtccagattgatttcttcgaaccacggacggatcaggtaacgaccgaaaccttcgatctggatgtcaccgaactgacggaagcgagaggtcgcaaccgctttcagtgcgtctttgtagctgaacagtttctcaaccatcaggttgtcgaaacgtgcgttagcagcttggatcagaacgtccaggtcagcagcgttttcttcccaatccagcggacgaggaatggagaacggagccagcaggccgattgcgtaacgttcttgcttcatgttgaagtcaaggtgcttaccgcgctcacgacggttgctgttgttacggcggatacgcagttcgtaaccaaccagtttgaagctcaggtcttcagccagttgtttgaactcttcgctcttacgcggttgttcgatgttgtcctgatcaaccaggcgatacagttcagcgttagcgccgttaacacgcagaccggctttctctacgttggaagaaccgtaaacttcgatcgccagctgagcagcagatttcgcatcgatgatgtcctgcagcgcttcagctttcgcgcctttaacgtctttggtgttctcatcaacgaagatggagtgggtgtcgaacgccagggtcattttgcggaagtcgccttccagggatttctggaaaccgttggtgatcagaccagatacgtcgaacggtacgtaagaggttttgctgtgcttggtagatttgatttccaccaggattttggtcagcgtgatctgggcgtccagcgcgtcggtgttgtcgctgtaaccgttagccaggatgctatcgtcttcagcaataccgatcatgtcgatcagtttatcaacagccaggtaagacgttttgtaagttacgcctttaatttcgatgtcgcgcggagcaacgatagctttgtcaacgaagtactgtgcgttagcatcgtcagcacgatagatcggatgcagatcggtcacgtcgttggacagaacgtcgttgtacatgaacgcatccagcagcggacgacgtacccaatcagccggagtaccgtcagcgttacgacgaaggtggttgaacaccagcggacgacggaaagatacgtcgtaaccgatctggttcggagccagaacgatggtgttgtacagttcgttacccatgcggctcagacgagaagccttcacgttgaacacaacggagtacggcatcatgtcacgcagttctttctggtcgtaggacagctgaaccagttcttcagattcgcaaccgcaggaatcagcagccatcatgacgaagttagagctgtcaacttcacggccagacggagtggtgctgatgttcatggaacgtgcttgtttagcatattctaccgggttaccatgagccagcatgatcagtgctgctgcacgagcctgctgtgcgttcatggtgaacagctgttcttcaatacgctgcttctcttccggagtggtggtttcgaagcccagcatggacagaaccggttcttcggctttacggatatcgctgctgaagctcttaacatccatttcgttaaccagtttgtccatggatttgaaatcaaccttagaagcagattccatagacaggaaggtgttctccagacctttgtctgctggtttgctaccattagcggtcaggaactggcgagtggccgcgacctgttggctaagaagggttttatcattcattga

SEQ ID NO: 776 - DNA, 105 bp, Goslarvirus sp.
  source 1..105: mol_type = genomic DNA
ttgttcttatcgagccgacagccgacggtttcagcatcgttcctagcgcgagaacgaccttacgtgttgtctatgccttattcatcgcaggcgtctgtcacctag

SEQ ID NO: 777 - DNA, 1437 bp, Goslarvirus sp.
  source 1..1437: mol_type = genomic DNA
atgccctccatgccaatatgtgataccgcgttcgaaccgtgggatggtacgcacgcttatcgcattgacggttatgctgaaccgttatatgacctggaattaggatgggcatgtattaatgaatctggccataccgtgttggttatcacctccgacaatatgttccagtacattcctggtagggttgaggacggcaatacattcaggatcgtacgacgttcaaaatttcgtagtcctgtaatagttgacagccatgacgtatctaatgcgaatggtgcattcagaaacttcgtctacgcgggtagacgtcgggatatactccgtgttaaaaacggtacaggttacgcgataaggaaaccgcatatccgtcgtattgttaacgctgagaaaatgccgcgtctattagaccagcaagactggtacgatacgctggatgagatatgtcaaattgacctcaacacgctgaactttaatcaacccgcttatgtcgcgcaaatcaacgtggcaatcgtaaaagttaaaggagaatacaaaagcgcagaccacgttacgaaagggattgatcacccctacatcgcaacgtgcgcgcggagcttgacgggaaaaacagagggtttccggattctcggaacgcaactcactatccattggacgccgcccgactttcataatccgtatagcttatgggttaacgtgttggggaaagcgttcgaaataaaaccaacgaatggagcaggcgcgccaggtatgttggttaccttcgggaataatgactccatcttcgtaccggtcgaagatttggaaaaagagatgtggaagtacaatgtttttccgacacgtgaatcggcattgcattggcgcgaccccatccaaaaagaagcctacaaaaatgatttcgaccaacgtagctacgaacgtaaggcatcagaagaaacccttaaaggggtgatggctgaaatgcgacgtatggcggatgaacacaaggcagttatcgcacagatgcatgaggcgcatcgcgccgacgcaaagctgcgtgatgaacaacataaagccgaactcgatcagcttaaagacgaacaaaaacgtaggatggaacaacaccaagccgaaatgaagcgtcaagatgatctacgtagacaaatacacgaagattatcaagctgatttaaaacgtcgtgacgacgaggctaaacgcaaacatgaagaattcgtcgctgaacttcgtcgtcgagacgaagaatccaaacgtaagcacgacgagtttgctgctgagatacgtcgacgtgatgaagaggcaaaaagacaacgtgaagcggaagaagcgcgacgtcaacgtaacgtcgatgtttggaaagccgctgcgagcataaccgcggccgttgtcggtataggtatgacctttttcaagattcttgagaaagtgtcatcgaaaaagtaa

SEQ ID NO: 778 - DNA, 1797 bp, Goslarvirus sp.
  source 1..1797: mol_type = genomic DNA
atggatcctagattctgcaaagctgtcgctgggcttgcaccgaagatgaacgagaagatagcacgcaacatcgtcgtcgataagatgcaagatgttgagtcctatgttgatcgtctttggcggaacagcaaagatagtttacctaaggatctggtgtatcatggcctgcgtcgctgtatggcccgcgaacagttccactacttaagcggaggaaagaaaaccaaagggaaggatagcggtaagctgaccttcgaccttgcgccatccgatgtgtttatggtgatgctagaattccgctggtacggagcgatggaatcaggtgaccgtcgtgaacccggaaaggactactgcattatccgacatcctctcctattacccgcggtaggtcagggtggtaaaatgcgtctacgtggtgcgaacttcattctcagtgcagtgctcgctgacccggtaatcagttacacgaaagacatggcgttcatcatgcttccgcgtgacaaaatcacggttaaacgtacaccgtatcagttcctgagcaatgatacaccgaccggtatcgattatcgtcattacctgtcattaccctggtcacaaatctatcatcttaccaaacaaagtaaagtgaacggtgacaacatcaaccacaccagcgtaaccacactgggtcactatctctttgcgaagtacggggtgggtgagtgtttccgacgttttgcaggtgtcgaagccgtaaccggacggaaccttgctgaacgtgattttccgcgtgaccaatgggtaatctatcgcaccatgggggttattcctaaaggttttagtatcagcaaaagcggtaaaagccgtagcgctagcgctgtacgttacaaacatcctgatattcaaattgcagtaagacgtggaggcacggaacgtattgttcttggccttgtcggtgcattcttgtatctcatcgaccgttattacgatcgttttccggaagactatccggttgaagagttcgcgaatgcgccagaccattggcgtacattactcggtttgattatctttaataacaacaacgcggatgcgcgtttgttgcgtgatgtaaaccaccacatcgacagtctcgatctttacgttgatgaaattcaacagaagaagttcaaacaggaaaatattccttgcgacgacttctacgaatttatggcgtatctgattgacaatgtcactatcgaaatgagtcgtgttgataccacgacgatgttcggtaaggaattgatggtgttggaatatgtcatggaggatgtgcgtaagagcatctttaaactggggttccatcttaaaaccacagaacgtggtaaacgacagaacaaccgtaaagagatgaccaatcgtgatgtacagaaggcgttgcgaaatcaagttgcaacggaagcgattctcaatatccagagcaatcgtgataaacgtgagaaagtggcaacatcgattcagtcaccgggtgattgcatgctgttcaaagtgagcacgcatgttgttctccagagccaaaacgcaggcggtgctgcattggctgacgagagtcgtttggttagtggttccatcccgttctgtgcaagctatctgaatcttccacactccgaaccaaccggacgtcagaagttcagtatgtacgcacctatcgatgagcgcggtcggttaatcattaccccacaaattgcaaatgacgttgcagcaaccaatgcaggcttgaagaaagacgtcggtcgattcgatgaagaaattgtagaaattaacgatcacgacataatcgattga

SEQ ID NO: 779 - DNA, 2559 bp, Goslarvirus sp.
  source 1..2559: mol_type = genomic DNA
atgtataatggcagtaacaacatgtatcaacaaatgggttatagcgaaaacccttatacgagcacggttaattatgcggctgaacaggttcgtcagcaacagtatcagcaatctccgtacggcgcatacccgaataacgcctatcaaccaccacaataccaacaaccctcatatcagcagaactataacttcatcacccaagaagcgacgatcgtcaaaatccgtcaagccatctttaatgtcctgaaagacttcgctcagcaagacaaaatacaaaccgagttcgtcgcacgttataccaataacgatatgatgatggaatcgcttgttgaagactgttgttggaacgtattctcttacatcaacccgatgccgcagaacgcgtccgacgaccagatcgtctctgctgctgtgagcacagttgcgctgtatcaccttgtaacgtggctctttgaaccgaatcagtacccggaatattatcgcgcgattgaattatcacgcattaacccggaagccgcgaataagtacacgcagctgaataaaagcggaagcctagcgcaaatcgctcagaagtcacgtggtttgaagcagcaggtgatgcagatggggatgacttatcgtgggccgcaagcaagcgcgatggttagcaacgggtatggtcaaccacaacagcctgcgtacgctatgtatggtggaacctatccgcaaccgcaataccaacctagtccggcagttatgcgcggcatggctccaacaacaccaggatacggtgcacaacctcggccgacggttgtccaaccacaagcgccatcgtacattgattcgaaggattgtgcgttcaaccgtttgtatgatgttggtgatgacgatcctatcgttgatgaggtgcctgctactacagcgccgcgttacgaggcaccacaaccacggatttactcgacaaatcctgaaggagatattggtggtatcaacgatatctttgcagcggctgaacagtttgctgaacagtacgaagagccagaatggcatgttaaggctgggcagcagaaacccgttcaacctgaacctgcgcaggtgaaaccggaacccgttcgtacggctcgttctgctacggtaacaaagaccgttaatccaattgatgcgaccgaagatgctaagcgttacggtcgtgttgttcaacatgaagaatttatgcagatgcgtctgaaagccaaagactttgcacctaatagtcgttggccgacgttgtatgacttcaggcacttcgctcgtcgagcacgtatcgacgaaaacggaattcttcatgaaaccattgttgacattacatccctcacggaggaagaagtggaatacatcgaacttgaatcagatccaaccgctcgtcgtatggcagagcaggaaatggcaaaactggatcgtatcgcgcaagcagaagttgttcgtgttagtcttaacaaaccggttcaacgtgagccaatcgttgtcggtgagcagcgcgaaatgaaactgtttaccgtcaccgacgcaatcgctgcgtcaagcgttgaggatgctgaaaccaaagcttcagtggcaatcattcagcagaccaacaccgacgtcaaccaaaacgacgcattagcattccttgccaccatcaattcctatctgggaacctataccgacaaagagctggatgcaatccatgaattcctggatgcgttgtctattgataaaggtcgtagcgacgatatcaaagcttatcgtcagatcatgcaacagtatcgagatgttattcctctgcgtatctggcatttcctgaacgatagcatgaccaaagacgtcaataagctgatcaaacgtatcgtaccgaagaacttctctgaaaccaccatctctagcttcgttgatgatatcggagaactgtccggttggctgattcacgatcttaaaatggaccagaagttcattgaagatgaattctccaattgctactatacctgggtcaacatgctgaagtgtctctactgcaatcgtgacggcgaaggtcagtggaacattcgtctttccatggcagaactgtacaacatgcatgactacctgaaagccgctcacgaaaaatccgcagcgaatcgtgaacgtcatctggttgccatgagtgagtatcgtgcagaactggagaaagatggctctctggacgccgatgaaatcgaacgtcgtttggcggatgcggctgtcgaggatatgcgtgttaatccagacatcgttaccgacgaagatagcaacgatgcttactggtttaatcatagcgtgttcgcgatgcgtccgcatgttgttgttcgcgtaccgaccaacgccaagattctgaagctgaaccaaagcggttacacccacgcatcggctgcaaccaacccaagcattgctcgtatgctggatcaggtgttcaagaccttcgaaaccaaagtaaaaggtctgcaatctgttactgtaattctgagcgatgatactcgtctgaaagcagtacgtacggtaaacggtattaccgcttccgagtatctgctggaacgtgaagagcagtaa

SEQ ID NO: 780 - DNA, 273 bp, Goslarvirus sp.
  source 1..273: mol_type = genomic DNA
atgagtcaatataaactcattaccgtctctgtggatgcaaaggacttacgcgaaattacgttagcggccaacgcagttcaacaggacagtgaactgacggcatatgaacgttaccagcttttcctctcgataagcgacacggtagcgcgtatgcagcagaagtaccaggttcagttaaccgtaatcgacaaaggcgctgtgatcccaccacaccctagttggcgcgtactgagaagcaaactcaccacaattgaatcgtggttaacctcgtaa

SEQ ID NO: 781 - DNA, 2910 bp, Goslarvirus sp.
  source 1..2910: mol_type = genomic DNA
atgaacgatataaataaagggcgcgtcgccctcgaacgtcaaatgagcaataatgacgttgcgaaggcactcatgaacaaatttgtcgctcctgctccgcagtcacgtctttataatacacgtgatgcggaaggagcgaacggtcgtttcgggttagttgttcccgaccaaatgacgatgaacacggttacgcgtgcgaccgcgacaaacatcgaggataataaaaacatcctcgagctgttccctgaacttaaacgcgtgatgcagatctatgttgccgcgttgacgaaccctaacgatcttaagacggtcgagatgtttatcgacagcgaagatttccccggcagagtcgcagaaatcgttcagccgatgatcgataccatcgacacgcattttaagaatatctataaaataaagacgcttatccctcgtatcatcgaagacgtcttctttatcaagggcagttataacttcgttgttctgccggaaagcacgctcgaccgcgccattaatggtaacggtcaactgaaacttgaagaatacggatttaaagacaaccattttgcaagttgggggcttctaggtaacgacagtcgcaaacgccacgaaaatcaattacctgcgacggtttcgatggaagattatttctcgggtgttaatgaaaccataccgtacgatcctgttgttcgcatagacagcatcaagtttaccaataccctgcttcgcgataaggacggtaaattcattgaagcgaagatcgatattccggatatggttacggttgtcgataacccagacatcctccgcatgcctattctgcatcaacgtcgagcagcgacagcagtgcagcgtgcgttacgcgcaaacacgttaggaggtagtggtttggtaacgctgtcaggcgatccgaccctaaccgctaaccgacgtgagctgtcgcaagaacaggttaacgagatctggaataagctcaacatccagcgccacaccaaggtatcgcccgtttacgcgctggcaaccccagatacgcttgatcgtcaaagcgttggccatcctggcgtgatgcatgtaccacctgaggcattagaacccgtacatgcgcccggtgatcctgagaaccatatcgggtatttggttcagttggatgagtttggttatccagtacgtttggttgaagatgcggcgtattacaagcagttggaaggtcggttgtcgaagatcaccgcagatatcgcaggtacgtcaagcaacggcatggcgagcgagatgattggtgcagccaagaacatgatccaaggtacgtcatgtaatcaggtagacatgtcggccttcgtatcatcgtacgaatcgctgatgcaacgttacattgtcgaacgtatcgttaacggttatcttggcagtgcggtggagatcggtgcgacatcatcgttttatctgtcgatgcttgctcgtagcctcgctcacaagcagacccgtgttttgtttattcctcgagagatggtgacttacatcgcctatgaatacaacaaatacggtatcggtcgttcgctgcttgaaagtacgaagatgatctcatcgcaacgagccatgctcatggttcaagaactgatggcgaaaatcaaaagttcgttgaactatacgacgctaagcgtaatgcttgaagacaccgacagaaacccggtcgataccgtcgaacaagcactgcatagtttcgctcgtgtctaccagtctggtttcccgttgggtgaaactaacccgatggatatcatcaacgcgtacgaacgaagctcgattcgattgaaggttgaggggaataacccacgcttcccgaaattgaatacagacgtcagtgttgagcagcgtaactatcagtctcctgataatgagctgatggatcgttaccgtcgtgaccatttcatgggcttgggtgtgtctccggagattatcgatacttcctaccaatctgaattcgcagcttctgtgattacagctaacgcgatgcaagagaaacagttcacggtttgtcgtgaggtgatcacgaatgggttatcggaccacatcaagaaatatacggcatacagtcccgtgttgttgacgtcgttacgaaacacggttcgtgcgaacatgtctaagctttcccaggcacaattgaagcagctttttggtagtgatttcgaaaacggtgttatccgtaacgttaacgcctatcaggagattgacgaccaatcagcaacaatggatctggattacactaaaccagaagtccaggaagttattgccgatgcttatgtgtccatgttcttaaacagtctgcgtgtgcgtttaccggatagcaatgctcgtcgccttgaagatcaggtacgtgaatataatcagtacaaggaagcgattactgcgcaacttgatgattatttaacgcctgattacgtcatgggtctgggtggggttgatgaaacaacgctgcagatgatccgcgcatgcattattggtaccgcgatgcgtacgtgggcaaaagagaataacttcaatcaggagctggctgatctcttcagtcttgacgataagaagaatgccgtgcaagattggaaacgtatgtccatggaacatattgaagtcatgggtaaatgcatgggtgattttgcattgtatattcagaatctgacgaagaagattgaagagaagatgggagctcaagcacaggacggtagcgtttcatctgatggttcgtggtcatccgattcaagtagcgataccggttcttctgatgacttcggtggcggtgacgatttcggagataccgatttcgataccgaaacgatggaggaaacctcaacagaagaaacaaccacatctgaggaaacgacgaccgacacaacgtcagaagacgacacttcaggtgacattgtctaa

SEQ ID NO: 782 - DNA, 2412 bp, Goslarvirus sp.
  source 1..2412: mol_type = genomic DNA
gtgtccaacactgactatcagctttattcggaaagcgtgcagcgtctaacggacaccctgattattaaaagcgacatcacggcagaacggttaaacctcaaggtttccgaagtctaccagatggccgtcggggacgacccacgcacgtggttatactacatgaatctcgctggcgagtatcatccttgtcagacaatgatgaccgtaaattccctggatacgctcgaagagatcgagttcactaaggaaaacatgttacggcatcgcatgacggcaagggagtacgcgtatggtggagattatttcaatcgtttaattgcgcggtacccggaacaacgtatgttgatcttgggtatccttaaccccatcgatatcgagaaagcaattgcggcacgcaatcatgagattctctggtacgatacacaagaggttgagtcacgcgaggccaatcttattccacgtttacagcaagaaatcgacgattacttcagacgctgggaacatccggcatacgagagcgtcgatatgcttcattggcctgcgctatacgccatcctattcacacaaatacctgagatgataaaaggtattcgttgggaaaactgtcatacccattatgcccatagcttccatatctggagttatctggcaagccatcaaggtctcgatcgattcaagcgatacatgaccgaatcccaaatgctctggttctatcgtaacatcgcttacgttgaaagaaacatgggcagaacggaaaactacgataagctcattcaaaaggtattaaccgatcgtggaattccaatcggtgcgttctcgatcaaacaagacgcttccgagataccccagacgttaaaacctgctgtttacatggagcgtaaaccgcttaaccttcaagagatcgtcggtaatggcacggtaagacgtaaggtcaccaccgtgatgcagcaacagttccctttagcgcgggataacgaagcggagtattataccgagcttaaccgcacgatagagaagatgtcgatgcatgacaacaataccttaacgaccaaggtgttggaaagtgaagccgaagaccttacagacagtgaactgtatcctaagtatgatttcctgctgaacgaatggattcatcttagcgcgataggcatgtatcagtcacggttaacgacaaccaacccggtgacgggtgataccatgacgatgtcgatgaaagatgcatacaagctgttcttgtatttgctgaactattcgatgggcatgacgctgattgaagtacctaagatccatgctaaccacgtcagggtgttaacgctaccgacattcgaccatctccgtagcattaccgatcctgctatcattcccgataaactgatctggtggtgtttggataagcaagtgacgctgcgtgctgtcgtcagtactgaagagtttctgagcgccgttaccgagatttaccagggctggcgtcgccatcagttcatgtatcagctccaagaacattatcaagctcgaggcatggctgaagcaatcgttgaaaacttctacatggatgttggtgtcgacttcggtattggacagctttacaaggaatggttcttatcgatggattgggagcttgacgcaatcagtcaagaagaggcgggtattctggctctcgatatcttcacaaaggccaccggccaggatttggaagatgtcaccagtcttaaggatattcaatacggaatgctgcagctgcttaagacattgagcagttacaccatccattttatccagacaatcaacagtgacccaatcaaaccactaaataaaatcgccgttcgtctcggttcgagtttagtaagtggtagtgaagaactgtgggaagactgggcacaggcaaacgttcatgatacggataaccaggctacggaagttatcaaattcgtgcatgataacaacccgatgacgaactggcgtgaatcagcggttgaaagtttggaagcgcctccgaaaccaacctggtgtgattgtagtggttacgagaacacccaaaccgttcgattcagtacgcaatattgggcacaagtcattagcgatcctgtctcgttacgtttccgtaaaaacccgctcgatgggttgtggcttgcaccattcccaggtcgggcaccacgcgaccttcgtgagcgtctgccatcagagtcgttgcgtgggttaaccgtaaccccaatcaaaccgttcgaacaacgtttccgtaaacgtgatcttcgaggtctctggatagaaccgatttacaaacagttgaacggtcgtttcagatcagtggctctaagtgagacgaatcatgttgcgtataagcctatcagtatgcgtctatcgaatccgctcaatcgtttgattgttaaacctttgcctatcgaggacgtttaa

SEQ ID NO: 783 - DNA, 936 bp, Goslarvirus sp.
  source 1..936: mol_type = genomic DNA
gtgagtgatacggtaacaactattgacgacaccgaactttacccggtcgacgtctctttaccctcatccgatctcgtgtatggtcttatcaaccacgataacccacctcagaacggagagcatatcctaacccctgaattattggttttaggaacaccaaccaccaaccaaagcgcctatgagcgcgacacccagattacggcgacagcaaccgctaagcttactgagttagacgattacgaaggttcgacgacactgtattacgatcgtattaacatcggtgcgtatctgcgtaacgtagctcctattcttatcgatgcgccagacgccgccaagatgcgtgatatctggcctatcatcaaagaacgtttcggtcttggtcttaccgaggaagaaatcgtcaacgacgaacttaactgggataccgttaacggacaattgcttcgtgtcgcatctaactgcctggcttggacggggagcgttcgtatcttgatgaaatcgcgtgtaccgaatcttgatgatattatcgcgatcaaggagctggacggccttaagttcttcggtcaaggcgtacgcgctagcggcgagatttacagttacagtcgtgatacttctgattacggtgaactgctggcttcgctggtaacaggtaccgttattagcgatgtggtggttgccgatcttctggctgaaatgactaccgatcgttgggtattagacgacaacgccgcaccgtataacctgtataatgctaaagtggctttcaacggtgagttaggtggacgtattccagcacgagcaggttaccaatacgttatcgagatcagtctggatgaaaactactgtactgctgtcggcggtccattgattttctattacaacgtcgacggacataccgcaagcctccagggtcgttctccagaagaacaaggctaa

SEQ ID NO: 784 - DNA, 852 bp, Goslarvirus sp.
  source 1..852: mol_type = genomic DNA
atgagtcagaaattgttaaacaaaagtcctaaagtactggtcgctgaacttattcaggcagccaatcctgacttcgactttaacttcgatgcaattgatatcacggatgttgctgaaaacggaaaccacgcgtataaacggaacacacgcgctaaggtatcgccttcggcaacagtaacgccagcacaataccgtgaaagcagctacgtgtggtacgatcgtatccctatccaagacttcttcttgggaatggaaccgaagcttgctatcgatgctggggttaaaacaacgcacgatcttatccctctgattcaatcaacgtacggaatcgttatcgatcaggatagctgcgtcgattctccgatcgtacgaggtgatgaatatccgttccctcacaccgtagaattgaaaacaaccggattggcttggacgggaagtgttacgttctatctcctcgatagtgcccacgatattgcggggatgatgaagacttcggtgatgaccggtctcaatttcccgtactacaccgcaaatcgtatccaggcattggtctacagttacgctatagactgtacggctatccgttccgatctcgccgggttaaaagttggcggtaatttaagcgcattggttagcttattcaacaacgttgcgccaaccccatgggtttataacggccgtgaagacgaaaacaacctttacggagccaccgtgcttgcaaccggtaaaacaacagaacttatcgcacagggttatcctgttaaccctgcgttcgctaacgctgttatcgttacgcttagccaagattactgcacgaactacggcggtatcctgttgatgcaatataactga

SEQ ID NO: 785 - DNA, 885 bp, Goslarvirus sp.
  source 1..885: mol_type = genomic DNA
atggcttctacacaaatccgtgctaccgatcgtatcgtccgtacgattatcggcggtcaagtacaaactaaccttacgctcggtcttcctcacgcatgggaagaacatagcaccttgaatgaaaagcttcagattcaatcaaaggtttaccccgagggtaatcctgctgtacgttacttctgtatcggcaaccaaggtcatgaattcatccgcaacgctaacggtatcccttcctcgatgccgatcgctcacgaagcaagcgatctttcaccgtggaaaatcaagccgttcgtgatgcgtgaagttggtaacgatttgaccacagacgaacgcgctaaatttgggttacgtcgtattgagacactggaaagcggtaaaaagtatatctgttattacggtcgtcgcatcgatttcgataacgttgtccgctccatgcgttataccaaatacgtcgacggcgtcgcccagaccatcgaatggcatccaaccgacgcgaacctcaaccctgcccgaccggatattccaacaaccggaattctggtagcgaccggagagtactacgactacagctgtaaagtctctttggtttggacgccgtgggatattaacgaatatctcaatgtggctaaactcaccgaaggtggtgaagagtacgcggttatttctgaaattgggatggtctctgctggcgataaaatcgttcgtgctgatgatggtcaaggttcggccttcgacatgaacgaaatcgtcggcgcgcaggttaccgatctgatttcgacttaccacaacctttataccaccaacgatacgctgacgctgaaatacgaccttggtgcgttggaagctcgtaaggcaggcccgacgggcgcagaaatcctaccgtaa

SEQ ID NO: 786 - DNA, 906 bp, Goslarvirus sp.
  source 1..906: mol_type = genomic DNA
atggagtacagtgaaatcctggggttagaatcgaaagaaatcctctttcggctgattcgaaagcatagcgatttcgatgctcgaggcgtaacgctggataaactggttatcggtgaagcttctgaaagcacagggtacaagcgtaacagcaagttaaccgtgcatccccaaccgggttcagggttggtgaactctgtcgacatctattataaccgcatcgatcttggtaaactgggtacctggtctggcggacagcaccgctggcccatcgagatcgaaaccttagatgcattaaccaaggtctctgagatcctacctgtcttagcatcgacgtacggtatccttctcaacaaaaccgagattgtcgacgcggatctggataagtccaagtcaccgatacaggttatgataacacctaaacccggtaaccaagtatgggttggtcagttacttgttgagttgacctcaggacgtaatgacctcaacaacctcgttcgcaacaatatgttggctgggttgaattatatcatcgatcgagatagcagtaaactcccaggcgctattgtttcgtacaactggttcgtatctgccggtgttttggcatcacttaccgatgggtatacgttaacctcaggcgatacgcaatcggaggcactaatcgcagaaatgaacgcactgcaattgggtctctctgaagagatcgacggccttatggtcaacgatcgctgggtactgtcagcaatacctggaccgctcaacttgcagaatgcgaaagtaatagccgatccagagcaattcaaaacactaccgttcggtgtacgtacagatgttagtaaagctgtcgtactccaactcagtgtgatgaatacgctaatcgatggttatctaacgttatatgtagcataa

SEQ ID NO: 787 - DNA, 1281 bp, Goslarvirus sp.
  source 1..1281: mol_type = genomic DNA
atgtatacattggtaaaaacttacggattacccgtaggttctggcacggcctggacagcgcttgaggcgggtgaaagtgtcctgagtacgttgttctcaacgtatcaaaaactcaagatccaggtccatgaaagctatgctgaccagcaacaagttattgatctgtacacatttcaatccgagcttcaaaacagcaatgacacgctcaatgcgtggttgaaaacgaaatcggatgcgcataccaaccttcgaggacagcctggcgagctgtcgattaaaacccacaagctttattgtcatgacgctattacggtaggctttctccctaaagtcggtaatagcggttatcatccgagcaacgcgatccctgagtcggaacgcaccgatatcctgttgacgaaagcgaatacgaattacgaaaatatcggcaaacactgcttgttcaccgtaggtggttatgttcatcctcacgtctacggtaaagacgttggtgtctatatccagggcgggttcaagacggcacagcgtagccaagaaaacgatatcggcatgattgattttagccgtatcgggagtttggaaatccatgctatcacagaagagatgattgctgattccacgaagctcttgccgtataaggacgagatgtatttacggctgccgcgcaaggtcgccgaagatgaaaccgtcgcgctggtgttcgggggatatttacatcttcttgacgattgctacacgatcgttagtgacacgacagcgaaaataaactgcattaacatgtttctctatgaacgatacttccgttcccgcaaataccttgatctaacatctcttggtattctgttgaacgaagaagacccgcaatccgacattgttgccaatcgtttattgtcggataaagcattaaaagcgtgggtgacgcatccttgcagtttctgggtgtatatcaaagcaacatcgattcaggttacgcaagaacctttaccacgaagtggcgtaccaggacaatatttcttaggtaagaaaccggaaggattgattcgagctgatctcggcgagttaccggcttacgtgcagacctatgaaaaaccgttatgggtacttcactcgcgctggggacttcgtaagaacatgctgtttgaaaacacgttgtacaaacatacccgcgttaagcggcttaacgatacgccttatcttcaccaggtctggttggaaacgcatgcgacgttgcagacagtacacaagctcgaattgatcgattccagtcagaaaaacaaataa

SEQ ID NO: 788 - DNA, 2154 bp, Goslarvirus sp.
  source 1..2154: mol_type = genomic DNA
atgacagatgaaattaaacgccttccgtataacccgcaggggaatttggatggcgcatgggttccagaagaactcgtcactgtccgtccttccacggggaccggatttaactttctcgttcctaaatacgcgccatattttcgcaatgggttaaagatctacaaccctgaaacaaacgcgtatctggaagaaggcgttgactttttatgcactcaccccttccgtgccatggctgcgctgaccggcctggaattatacggttccatcatgctgttggacaccgcattcagtggacagttgcaactgaactactattcactggggggtgagtttacacttgatcaacaacaaattcttaacgttttagccaacaacctttacgatccccgcgttacgttctgggaaaaggttgctgacgttccttccgtattcccaccaatcaaccaccaacataatgtcgaaaccgacacaatgacgtgggacgatgtggtggctgcaatcgaatcattgaaagaaccgcttgaagaagggttcaataaagcaatgaccgcattgctgcagcacgagaatcgtcgcgataacccccatggcgtaaccaaggcacaagttgggttaggaaatgttcagaacttcacaacggcgaccgagagcgatctggaaaccatcggtgaaaatctgtacatgacgttggcgatgacgcgtaagatgatcgctaacctgagtggtgatagtgctgctgcgcacatcagcaactacaacaacccacacaaggtaacgaaagcccaggtgggactcggaaacgttgagaactacggtgtagccgatagtaatacaaccattaccggtacggccacagatctgtacacaacaccagcgggtgtacgagccgcaatcaaagcaatcaccgatggcttaagcacgcgtatcgataacgttaacgctacgttgacaacccataccggagacaagaacaacccccacggggtaaccaaagctcaagttgggttaggaaatgtattgaactacggtgtagcatctaacgtagaagctgctgcgggtgttgctaacgataaatacatgacccctgcgaccacggcagccgctatcgcaggattaatcaccccaacggttaccgatcacatcggtaacaccaataacccccacgctgttacgaaatctcaggtcggtttggggagcgtgcaaaacttcggggttgccaccacccaagaagctatcgatggtcaggttaacaacaagtacatgacaccaatacttgttcgttacgcaatcgagcaactggctggtcaagggttcagtagtcatatcgcgaataccgaaaacccacaccaagtaacaaaatctcaggttggtttggggagcgttgagaactatcctgttgcttccgacgaagaggcgcaaacgggtgaagcaaccaaccgctatatgacaccggctgcgacaaaagcggcaatcactgctttagctggtgatggttttgcagcacacgttgtcaataagagcaacccgcatgaagtaacgaaggtgcaggtcggtctcagcaacgtgcagaactttaatgttgctaccgatactgaagcggctgacaacaccaaccaatcagcgtatatgacgccgtattcgacgtataagtctatcgtggcgtttgcggcgttagctgaccatacacacaccgcagagcaagttggtgcgttaccgatcgacggtggtaagttaaccggaccgatcgatctttcggcgacatccatcacaggtgcaggcatcggtattgatggtgtcaatggttcaatcaacaccaacacgctaacagtcaaccagcttctggaagcttacggtggcattgaatccagtgatacgattaaaatcctgaacgacgatgagacacccgccaacttccttgccgatggcgatctcgaagggatcaaatgggttaacatcaacagccaagaacctggagagaacgaagacggcgagaagatgcagaagatcggtaagctgagcgattaccttaagaacgattatttaaccagcttgcagacgaacacagcgtttcgtgatgtcttccaagcactgcttaaggaattccttgccaacttcaacgcggttatcaaagcaaccgacttcgaaacgttataa

SEQ ID NO: 789 - DNA, 510 bp, Goslarvirus sp.
  source 1..510: mol_type = genomic DNA
atgggcacaaaaatgagtgaattgggtgctcgcatgacgacatggtacgcaaggaaggataaccctaaccaagtcactgcagcgcaaatcgacgcacccgataaaaacacgatcgatacgagaatcggcaaaaagctccctaaggggatactccccgtagcgtatttcggtgactgtaccgatattcgtagcgaacgcatcagcaacgttactgccagcggtacggtaatctcgtatcctgaaatacccgtcatgatcgccggtaccgactatattctggcgaagggaacgctagacatcaaaaaacttacttccgactgggcgaacaaaaccggttatcttttcattcgtcagaaagacggatcgatcgattggatctggcagagtagtgctggggtcgatacgtcaacagcaattcgcgtcgggcaggtgagctgtaacgcaacaggaatcacttcggtggtatttaacaaagtcttcatcctcggccaaaaacgttacatggggtaa

SEQ ID NO: 790 - DNA, 486 bp, Goslarvirus sp.
  source 1..486: mol_type = genomic DNA
atgaagctatcaacactgctttctgaatgggggacgtatcttacccaaaagaaccctcacgaggtaacgccaacacaaacagatgtctacgttaagaccgaagtggcccctaaacttgcaccgcttgttacccagcgttaccttccgtttcttttcttcagtcgaaataaaacgcttccagcagccagttacagcaacggacggatcagcattggtcaaggtacagcggaatacaacacggtggtagggacggtgccagcagcaactttggacgtgtcaggtatcagtgagtctgtaggctggatctatcttgccgtaaccgatagcggttttgtttacacgctgaatgatagcgatagcagctacaaaaataccatgcgtatcggtacctggaacaaaatccagggtacatcacatcttgctgcaacacgtaaggtggccaccatcgagatcgatgatggtcagctacccgactcgcctatttaa

SEQ ID NO: 791 - DNA, 2598 bp, Goslarvirus sp.
  source 1..2598: mol_type = genomic DNA
atggcaatgaaaaagttcagcgaactggtgagtagcgttactacacgtatcgccagtcgtgacaacccaacgggactaaaggcgagcgatctcggtgcctacagtaccgctgagttcaacactgagatggaaaaatacatcgatattggcgcaaccgatatcgaacaggttggggaccaaagttattttcctctggcaatcgaaggttcggccgatggcgctatcggtttaatcaccgactatcgccattacggtatatgtcgtgaatctgacgggacgatcgtcctactgaggtcagcgacaaacagcatcatacacggtgtatattacgttatttgtaaaactgatcaaaatggtgcagttactagcgtaataccaacaagccgacagtaccaaccagctatgttggatctagcacctaaagccatctactgtcatcagaacaacatactactcggattagcggctgatatcaacggcaataacgccaaaatgttcatcgcgttaacggacggcacattcgacgccagcaaacacgttgcgatgtatatcgacggtgctttatccgatttcaaagaaacaatgcccgatgtttgttgttgggaaattaatggaactatttacattggtatagctattcggagcggctataaattatcactaaaaatttacaccgttcaacgttcctctatcgcccctacagggggtagtgtatcggcaacactgattactaacataaacggcgttacaattgaagggactcaaataaacaacagcagcgagctcgttgtctgcaacagcatcagtacgaatagtttcccgtccaacgggatcggtcaaatcgtctggcgcgccgcaatacgtttatggtccactgtaaaaaatggtaaagcgcgaattctggtcggttcgtcgtggtggacaaatgatcgggacaaccgtcgacgtcaaggaatgcatcatttttacatcgattttgacccgaccaataacagatacgccatgaatccaggatcgggacaagctacatactacgccgaatcgaacggcatcgcgtggcgaggaccgtcgacatttacacaaggagaatccaattataaagatggatattgggtgtggggggctcacaactgtatcggtaatatcgatatcaatgattctgggcaagtaattgctgtacaaaacgacaataacggacagccggatatacgtacgtacactatcggaaacttcgcaggcacagcttacgatgaaatagccaaaatgaatcccgacagtacgttatatacttcagcttggttaaagataaaagacagggtagttggagctctggcagcgcatggatatctcgcatttctatcagcaaccaagatatacacgttatccagcagcggtcttggacaaggccactacgatgcacgtaccgtaagttatcaaggtagttggacaaactaccattaccacggtaatggcatcgatgtctatggtttcatgccatcgagtaactttacggtattaaactccctggctgcgccattcttgacaatttatcgtaacggtaacgtcacactcagcggatcttacttaaacgaccttcgtctatccagcaacattggtctcaattacgacacgttaatccctgagggcgaagccatttctatttctgaacagaacctgaaatcggctggacaaaccgtctggaacgcatatactggaacaaaactcagcggaatcaccgactggaaacaatcgataacgattcctccagaaacaacaaacgcaccgtgtttaatggttgtattgggatttaacagcagccagcggaaaatgggtgtcgtaattgctgaagttagtgtgtcggcacgcaagggttcgatcgctataaccggcgtacaaaaggtgatcgcctacgttgaacgtgttgataccgtgaatatttgggccgataacagagcgtacggttcgttcgcgtatatgcaaagtacagatggttggttagtggcgggacatgtccctcttggccgaggaacatctggaaatagcaatacattccaatttagggctggacgaaaaagtgatggtagttgggtgaatgcggcctatgaagacttgtatacatatttacaaaacagtgggtaccgctggaacattcatccgacttggggtatcggctacgtaaacactagcgaatcgaccattatgggtaacggggggcaagtattcaatgtcataggtaccacaatcgacgactataatcgtggtatcgtcgcgtctcgaataatggcctcaacagtcatcgcttcttccggtttcgacgtttatatcaacgaggatatttcatgtttgtttgctggtaaggccatgaccttacctaaaggccattataacctaaaagactataatagctcaccaggtaataaaacatggtacgtttccgttgttcctaatggtaaccagttagagctggaattaaccatccacaagcaagaggatgataaaggacagcgcgttaatatcggcaccatcacgaccagcgatacccagatctcagtcattaatctcaataagacaaccaaattaggtacagtcacgttataa

SEQ ID NO: 792 - DNA, 2049 bp, Goslarvirus sp.
  source 1..2049: mol_type = genomic DNA
atgtcaacaccaattaccctgaagtaccccgaggactggaccggcacgctcgatagcaaccacatcgttggtgaagagcataccgttccacgaaccgagaacaaatgttacgctcttgatggcggaccgttcttcaccgaaagtctggtcatcactgaaaagcttaccggtaagacactggtacgcggcgtggattacaaacccatcttcttgtatcaggacgctacgctttacgctggtaaagaaatctgtgcagccatcgccatcatcaacgatgatatcgaggggacgttagttaacgactatcgtatcatcggtggtgtttacgtaagtcttattgacgcgttgtatcaggctatcgaagaactcaaacttgacgatcgtccgatcaactgggacgacatcaagaacaaaccggaactttatccgcctgaaccacacatccaccacgttagtgctatctacggtaccgaacatctttgcttagcgatctattcactgaaagccgcaatacttatcggtgatgctgcatccgataaccgtctctgggcggcaatcgatcagttacgcaaagacatgcaagcagcggataaagatctgaccgatctgcattacgcacatgctaaccgtaccgataacccgcacgaaaccacaaaagcccaagtcggactaggtaatgtacagaactatcctactgccaacaaggcggaggcagaagccggtaccgcaccagaccgttacatgacagcacaaacggttggatgggcgattgctaaactggcgggcgatctagtcgacgctcacgctaaccgtcgagacaacccgcatagcgtcaccaaagcacaggttaaccttgggaacgttgataacttcccgaccgcttcggatgatgaggcgaaagccggaacagcgaacaaccgtttcatgacgccgctacgcactgttgcagcgattgaacagttcgcattgattccacttaatgcacataaagccgattacaacaacccacacagagtaaccaaagcgcaggttgggttagggaatgtgcaagactatccgatggcttctgaagaagaagcgcgtgccggtgttgcagctaaccgattaatggcaccgaacacaaccaaagcgtccattgagacctttgcgttagttccgcttaatgcgcacatcgctgacaagaacaacccacaccaagtgtctaaggcacaagtagggttgggaagcgttgagaactatccaaccgctaaccaagctgaagcgcaaggtggttctgcaactaaccgttacatgacaccacagtctaccaactgggcaattcagaaattagcgggtgatctggttaacgctcacgctaaccgtcgtgataacccacacgcggttacgaaagcgcaggttgggttaggtaacgtacagaactatggtatcgcttccgatgcgcaagcgcagcaagatgttaacaccgtgtattctacaccacgtaacgcccgcctcgctgcaacgcacatcatcgatacacgtttgttctggggttcttacagcggaaacaaactggtcttcgttgatggtagtggcggtacgcgtttaggtaaacatgtcatcatcacggagaatggtggcggtgagatcacacgcttctattgggggaactctgcaggcggtggtagtgcgctgtacttcaacagcaatatcgatgttcctaacgcttacattcgctcggatgaacgtagtaaacatgacattcgttatctgaaagatcatccggaatctttcagtgatcgtttacgtgaaatggcgtataccggacttgcccgtttccgtcacaactacgatcctgatgtcgagaagatcggtgttatcgcacagcgtgttcaagaacagttcccggaaatgatcaacgtatcagataaagggctgttaagtcttgacaccatggtgtatagcggggttctgttgggtggttggtacgaacatgaccaacaacttcgtgctctgcgtgcaatggttgaagaaattgcacatcacgtgaagggaaccaagggtatttaa

SEQ ID NO: 793 - DNA, 636 bp, Goslarvirus sp.
  source 1..636: mol_type = genomic DNA
atggctaagattactgagaaagatttcacgtgcgaatttatcattcgcgataaaaccagcatcgaagcaggttacgtcgacgatcccgatgattcgggtggaatcacgaaccacggcattacgaaaacactcgccgatcaatacaaaaccacgctgaaaacgaaattcggctgggacggtaacatgcgtaaccttaccacggaaatggcgttctttatctacaagacccacttctgggataagatgaaacttgacgaagtcatgaaacgttctgtgttcttagctgaccgtctctttgacctgggtatcaatgctggcaaaaccgtcccggttaagaacctccaacgttatctgaacgtcatgaacaaccgccaaacttactggaaagatattgatgctgatggcgcaatgggccccaaatcactggcggctcttgatgcctatatcgctaagcgtggcgcaaccggtaaggattatctcatcgatgcaatgctggacatgcagagcacctattacatcgaattagcggaacgtcgtgagaaagacgagaagttcatttacggttggcaggcgcgtaaacgtcgtgaacgtaagcgttacgaagctatctgtttgaacggtttcagtgttgaataa

SEQ ID NO: 794 - DNA, 111 bp, Goslarvirus sp.
  source 1..111: mol_type = genomic DNA
atgaagcgtggtgttgaaagggttgtggatctcctcaagcggccagggacccagaccaacccgaataaacacgaacacctgttaagcccctcctcatccgttattgggtga

SEQ ID NO: 795 - DNA, 90 bp, Goslarvirus sp.
  source 1..90: mol_type = genomic DNA
ttgtacagctcggctattgctcttctacaatttggttgtaacaatctgcgtggttgcacgcatatctttctcattgagcgcttcgtatga

SEQ ID NO: 796 - DNA, 600 bp, Goslarvirus sp.
  source 1..600: mol_type = genomic DNA
atggagaacgactccgaatctccttttcgaccatcaaaaatcagaggacacacaatcatggccttagactttaacaaagcagcgaaatcccttctgcttgatcttattaacaccaaagcgacccgcacattggctgaagaagaactgcagttcggtactccgggggcatcttccgaacatgaaaagaacaccgttattcagctggacgctgcagttggtgcagaaaacctgcagggtagtcagcagttctactacgatcgtctggctctgtctgacgttttcgctgatgtaaccggcgatgttactttcgaactgccgcacggtactgacagcatccaggcttctgaactggtaagtaagctggtcaccaaattcggcctggcttccctgaccggtgaaatccaggaagaaaccttccagctgtctgcaggtactgttggtcaggtaactctgactgcgatcgagggcggcctggtatataccggcaccctgcaggttgcactgacctacgcagctgcaccgaaagatgacctggcaaccgttctggcgaataacgtagctgaaggcttcgagaaaccgaccgttagcgttgttggctaa

SEQ ID NO: 797 - DNA, 93 bp, Goslarvirus sp.
  source 1..93: mol_type = genomic DNA
gtgaaacttgagttgccattttctacctctatggttgttacatcactctcaaaagatgtaagtgtttacagaaataagtatattttatattaa

SEQ ID NO: 798 - DNA, 894 bp, Goslarvirus sp.
  source 1..894: mol_type = genomic DNA
atggcaactcaagtttcacttactttaaaaacaccttggcaacttatcgttgatgagatcaaccagctcaacgccgacactggtgccagcttccaatacagtgatcttaaatacgttattaaatccaaaagcgcttctgctccagaagcaactttaacgcttagccctggtgaaggtaccccttacttcaatgaacgcgatgttacctaccatcgtctggatctggctaagtggttccagaagatcgccgtacgtgttaacgttactgctaacaccaccatcggtgacgtggttgaccttgtagctcaacgctacggtatgatcacgccttccggtgagaagttcctggataaagcgaaagacatcaaagccgatacgttatctaatccggttaccttcgacgagcatggtatccagacgatcaccctggaagccaaagaagattcgttggcgtggtatggctcggttcaagttaaagtttataacaccacgctggatctggctaacatcatcaaggttaccaacctgggtaacttaacctacgttgatgaaggcgatggtaccaaaacgtcagcacgtctgttaacctatccgttagacttcagcacctatactgcaggtttacaagctattaccagtaacgaaaccaagatcgatgcaagcctggcaggtaacctgactacgctgatcaaagaacagactggtgtaagtgatgatatcatcaatgaactgaaaaccaatctgcaaacggctacctttgtctataacggtgttaccaccgggtctaccgacaagggtgttaacgctacgtacagcaacgtgttggtggtgtcgttaaccgacggtacccacacctacggtaaagcagtattcggttataacgtttccgaataa

SEQ ID NO: 799 - DNA, 111 bp, Goslarvirus sp.
  source 1..111: mol_type = genomic DNA
atgtatttggaaagtaaaatttccacgacctcggccccttcgggggacgggggaggagcgaagtcctttagagacgagcaacaggataactctaagaaaaagaaaaactaa

SEQ ID NO: 800 - DNA, 156 bp, Goslarvirus sp.
  source 1..156: mol_type = genomic DNA
gtgtttactaccttaacggtaacacatgtcatctgtgcattacactccgttacatgctggttaaatcggataactcaaaaaacatttgtgatactcttcttcacgttgttcatcagagtatctcgtctatactcattgcattcgtatacgacataa

SEQ ID NO: 801 - DNA, 783 bp, Goslarvirus sp.
  source 1..783: mol_type = genomic DNA
atgaacgatgaaatcatttttgataccttatacacccaaaaagagtatcaggcattacctgagcatgtccaagcggaatgcgtgaaggtgcagtggttcaccaatttgcttgatgggccgacgatgctgcttgaagacgagagaaccgtaggcaaggtgatatggcgtggcgcatgcggttatctttacgacgctcgcggtgacggagggctgtatgcgcataagagccagcatcccgcatcgatgagcgcaagcaggttggtggtacatcacggttatcgcaataagggcgcggtggatgatgtcctggatccattgttcgccgatcgggttcgttgcgttgatcggcagtacgcgatgctggccggtaaacagcaggtctggtcaatgaactcggatagcaaactgagagaaggggatcatgccttgccaagttggcgtaaccataccgttggaacgtattacaccaaaaagcttaccatggtgaaaccttacatggtggatggcaaattggaggcaacggatcggatgcatcaattgcttcgcatgttttatccacgggtagtccatccgcttggattcgcttgggttagcgaggtgcgttacaacccacgcaagaaacgtgttgaagcgaaggtgcttggggaacgttggttgccggttgcgcaacaggggcttgatgacgaatccatcatgatgcgggtaagccgaagccagatcgtacaatgggatgctaccatgctacgccatccgcaacacattacaggagaaacgttcgcatga

SEQ ID NO: 802 - DNA, 300 bp, Goslarvirus sp.
  source 1..300: mol_type = genomic DNA
atgatacgtgcaacgggatacgagaacaaagggaagaacagcgtgcagcgttacatcgctgacgaggaagggaaagcagcatacctggattggttcaaccgttacagtgcaagcaaggtacgtgatcctagcatcctgaggttacagagcagttttcaatggcaggcttccgaacaacgttggtacatcacgttggaaatcggaacggtacgggaagaccagcttcctgcatgcttaaaagaacaacgggagcagatcaacacattactcgcacaacacaaaacggaacctaaacattaa

SEQ ID NO: 803 - DNA, 276 bp, Goslarvirus sp.
  source 1..276: mol_type = genomic DNA
atgttgatgaaacccacagcaaagaacaaagtttataaagcgatctacgcgtcagacacggttagcctgacgaagatcatcaaatacaaacttgagaaggtgctacgtgttgaaccgagcataggcttagtccgttatcgcctgattaccgagaacggtgaagggtattacgcaccgtcgtctcgaagcgataacgccgttgtgttaacccgggatgtggttgaagcaatcaacaacggaacgaaggcgttctacgcgcacagaaaagccgtataa

SEQ ID NO: 804 - DNA, 408 bp, Goslarvirus sp.
  source 1..408: mol_type = genomic DNA
atgcaacatgatcaaacgaacaccaccgcaacgtcaatagcccttgccgatgccgtccaggcgtggaacgagaacccagcctgtcgagcaaagatggaattggtgtacgaaggatcaacccgtgtcaggacggctgatgatgttctggtcgtacgaggtgaattcttcgccttaggtgtcacggaccgtggtccgttagatgcgctttggatcgagttacaaacctgcccgcagagaccacgctacgtgacccgtgaccatcgtcctgagaacgcgttagtcggaaccggttccgtggatattttcatctggcaggataccctcgacaacatgaacaagatgatcgacgttgagaacatcgttgcaaataagttaacccaacttaaagaacgtctgatgccgctataa

SEQ ID NO: 805 - DNA, 444 bp, Goslarvirus sp.
  source 1..444: mol_type = genomic DNA
atggaaattaaattctgtaaatcgatcgcgattgtacctgaacaacctgcggatgatctcgaaaagctcgatcatcccacactgcaacatgcgctggaacgtttagcctcttttgcgccgttagagaatcatcttcactgcgttaatcttgaagcatccgacttcgacgtgaagcttgggttcgtgttttcacaaacggggaaggatgtgttagaaaacatattctggtctgctgagcataaggcgagaaatgtgatgacgaagttagtttataacgttagccttagtgaagacggcacctattggacgtcagaggcttgctggacgatttctgcgatttcacgaatggacaaaatacactatttgcatcgtgttgctgatagcattgtacaccaactggatcgttttgataccacccgcttatcgaatggaacacagtgttaa

SEQ ID NO: 806 - DNA, 426 bp, Goslarvirus sp.
  source 1..426: mol_type = genomic DNA
atgaaaattaaatggcctaaatcagtcgccgaagagtgtatcggtgagtatagctcatcggttaccgagcatacgcggttacatcacacgttattgcttttacgtgaagacgccaaactccgcaaacatattcaaccgatatcagcaacctactgtaaaacgtcatcgtacctgtactcttcccggttaacatttgcttgcactgcgttagggaaagtattgctagaatccgcatatcttcgtagttgcgagaacatgaaattgacgggtggtatggtactctcaatcgatgtgctttgtttggacgatggaacacataaaccccagcttgtgtgggaagtatatggattgaacccagccatgattaagacgaagttcgactggattactgacggtcttaatgagattctgaaagaaggaatttga

SEQ ID NO: 807 - DNA, 363 bp, Goslarvirus sp.
  source 1..363: mol_type = genomic DNA
atgcaacaacgtatcggtttatcgttagctattgaccgactgatcaaagtctcatcgttgcgaagtgaatttgttggcgtccgtgaagaagctgcgaataatcgctttattttaacgtttacgtgtaccaagaaaggcgtgacggttatccgtgatgtttggagtgctgtgaacaaacgcgaggcccgttgttctacatctgtcgttgattacaaaaacctggataatacgtacactatccgtttagaatgggagcatcgcctcaggacatttgttgaagttcggtcgaagctgttagctgaattgttgaacgaagcctgcctacgtgacgagaacgctacagaactcttcagaacgctttaa

SEQ ID NO: 808 - DNA, 390 bp, Goslarvirus sp.
  source 1..390: mol_type = genomic DNA
atgttaaattcaacttttacccactatctccacacctatgcaaaattatgctgtgttgatatggaagagctggcgaacgataatagtgttcgcgattgtgagatgctccctaagcgacaaggttttctacctggttctcggtcagcggcgttcttcttaatcgcttacttcatcgttagtcatagtgcggcgctgttgagccaaaccaagaaacagcgaaaggattacgctaccgcaatcactcaagtctatttcgatcgtcttcacggacgtgcggtgagtatcgataccgcgttaacgaccgcgtttcgtcatcgaggcgcaaccgctgtacagatacccgctttggttaagatcggaaaagaaatcatccagaatgcaacgcgttaa

SEQ ID NO: 809 - DNA, 1089 bp, Goslarvirus sp.
  source 1..1089: mol_type = genomic DNA
atgagcgacctggcaacagacaatcgcacaaaagggagtcagctagctccagacaacaacgtaagcgttttccgtatctatgccttgggtactgttgctgccgacttttccaataaaagtctggaggaagatcctaaccagacgctggaggtctttcttgatgagatgatgtcaggcgctgatgggaaagttgaagcggtgggaagcgttaaagaagtcagtgcaacagacgctcaagggaacagctatacggcgaaagcggcaacaacaaccagcatacagtgttactggttacccttcggcagtaaccggatgacagcacctaacttgaggaaaggtcagcgtgtggtggtttggcgtaccgcggatgaagaacaactctattggcaacccaaaggaggggatagcgagctgatgaccatggaatcggttatcctcaccgtcagcgcacgtcctagcgccaagaaggaccgtaaatcgatttcaacggaagactgctattacctaatggttgataccttcctcaagaaagcggttatcggcaccagcgcacagcttggtgaagttacccaagtctacatggaacttaatctggacgagggttacctacaggttgcggacagcgttcatcaaaatctgttgttactccattttgtcgagcatatgctgcgttatcaaaaccaggacgacagcatcatcgacgtgacaaaaaagaacatcacgttccagtgcgaggatacgctcaaagcaatcgctaagaacgatatccgaatgaaagcaaaaaatatttatacggaatgtgagaactttgaacgtaccagcaaaacagaaagcgttacgagtcagaatgtttctttgaagtgtgatcgttacaccgcgcaagtatcaggacagaccacgtttaaatgtcctaatacggtattcactggagctgtaagcttcacaggtgaagacggaaacacgatgacgttgaatgggaacttcgtacacatcgcaggctcttggcgttcaccaaccggaacaaacgtatacacccacgatcacggtggtgtagatcgtggtagcggtcgtacagacccgttccaataa

SEQ ID NO: 810 - DNA, 2520 bp, Goslarvirus sp.
  source 1..2520: mol_type = genomic DNA
atggcttcagcttcgcattctgaacccgtggttcagaaggtatcgaagaaggattatcatagcatgcgatgcacctatctccacttacgtggattcaatcgttttgataccgggatgattcgggagctggtcatccggccagataatcccgtacaactcattttaggcagtaatggttccggtaagagtagtctattgcctttgctgtatccgaccgttcctgagcgtgctgattttgataaagacgggtattacgagtaccgctgcgaacaccgtaataagcaataccgtcttatcagtcgtttagaaaaagggtttaagcatgagttctacgttaacgacagcgagaacctgaacggtggtggcacacaaccggcccaatggaaactgattgaagaacatttcgaacttaatgatgacaccattcgtttgttgctaggttacgaaacggcttatcagttcaccgaaatgggaccgatgaaacgccgcgaacgattaacacagatatgtccggttaacgtcgattatgcgctcgagttgtttcaggttgttaagcaacaagtacgttcactgaaagcggtgaatgagcatacactgaataagttggttgaaacatcacagcgcattgaagcgaaatacacgggcaccgaccaccagggattggaagcagagttaaaacagcaacgctcagcgctcgaagcgatgatgggattgccgttattcgatagcgatgttgatcaacgacagcttctggaatccgcacaacgtgcccatcattttaatcgcgagcttcttcgtgcggttgttcgttaccaaggaggaacatcgcaacaagaacagcagaatctggctgaactaagagagcaactcgcgaatgcgaatgcaaaactcgaaagtcaggttgacgagctgttgggtatcgataatatccttgaccagttgaaacagtctggcgaaggtgatatcgatcaaattaaagcccgcattgcatgtttggacgaacaacttcagcaagatcatccaggtgagcttttaacgatgaatctggacgctgcggtttgtttacaacagctcacacaagttcaggctccgttaacggaactattgcaagaatggattgataccgacaacacctatcatgtttacgatgctgaagcttacatcaaggaggaagaggcagcaagaatgcgtttgcgtaacgcgaaacatgcgttagccgatttggaagcgcatctcgaccatctgaatcatcaaccccagaccagctgtccaaaatgcaattatcgctttcatgttggtgaaacggaaaagaccagcaaagcgagtattgaacaacgcattcagaaaggccgtgcttgggttgaagaacaagagaaatcgttagctgagcttagcgagaaggttcagcgttatacgctctggatggaacaacatcgtcagttaacacgttggacgaaggattattacgccattaaacccatgtgggacaatctgctggaagaaggacgtaaaaacggattaggattccgcagcattggaatcattaatgattggttgcttgcattcgagaaactcgcacgttatacacaagccgaacaagaacgtaaacatcttcaaggcatgctcgaacgtgtacaagcggttgatgttgaaccgttacagcaacgtcgagaattgctttataagaacaggacagagttgttaacaaccgttgagcggttaacacaagccatcacagctacggaaggtagattggaaaccattacggcgattatggaagatcaggtacgttctgataacagcgataaagcgttaacgcaactgtggttagagtatctgcaacacctctacacgaaatcgttacgtgctgcgatgtctgatacagttcgccgaataagtcatgtcgaacagcaactacaggaagctaaaaccgaccagcagcttctggctcagttggaaacgacacaaaaagaggtggaagaacagctcagttacgcacaacttgttctggatgagttgagtccatccaacggactgattgccgaaacaattgcgggtcccatcaacgcgttcgttgagtacatgaacggcatcattgcgagtatttgggaataccaacttcagatactcccgtgtgctatcgacgcgcaaggattgaactatcgttttccgcttttaactgagaagtatccgacaccgcgaaaagatattgtttatgggagtaagggacaaaaggaaattatcaatatcgcgttcatcatcgcgatgatgcattacaaggggtttacggattatccgttgatgttagatgaattcgcatcaacatttgatccgcagcaccaatctaatgccatggattttgttcgtcgtctggttgatggtcaccgcgtaagccaggtgtggttcatcagtcactatgtgatcaaccatgcatcattccgtaaagccgagtgtatggttcttgataaaacgaacatcattctccctgaaacatataacgaacacgtcacgattatttaa

SEQ ID NO: 811 - DNA, 813 bp, Goslarvirus sp.
  source 1..813: mol_type = genomic DNA
atgaaaaaacccatgaagaagctaggccatgcacgcaagcatcgctattccgatctggagaaaatgtttttaacgcagcaaccgtttctccagacctactttaacgggatggcgaagaagttagccgatgagtaccaggagcgtggtacaccagcacgaattacaatcaccgtaattccgacgttcgctgaaaagatttataacgtcatgacggagattattcccgaagacgcaaaatcccaagatgaagttctgcgattaacgcgctacatccgttttaaagaacatctggacgcacaagcgaccatcattctggaaaacgaaaaacctgaacccaacattgagcttattgcttccctccttcctgaccgcctattacacgattttgttaccgtgaaacgtatcgacgaacaaggaaaagaagttgaggttcagctacgccaagaaaccgtggttgcgttggattggattgaagaccgttgtaaagcgctgagcaagcttctggatgatgaagggacgaatgctcgtgttgccatcgatttcggtcatgaaccggatgacgcggtaaccatgatgcgcgtgctgtatgatcccaaggttaatgatcatgcgatcatcgttaaacgcgaaggcgttaaaggcgaagtcactctggttaaagacctgggtcctattcacgcgataggtttaaccgaagaccaaacgccgttcgaaaagctttcggtgtatgagcaatcggaagttgaacgcttcctggaaggtgttgttgcgaaaaccttcccatggtcagtagaggctgttgtaacaccatga

SEQ ID NO: 812 - DNA, 642 bp, Goslarvirus sp.
  source 1..642: mol_type = genomic DNA
atggtcagtagaggctgttgtaacaccatgatcccaccagaatacgcttacgatattctggcaatcgaccctggcaccgatacactcggtgcgtcgttactacgtttggacgtgcgtgtcgaagatattgaactgctgtatgcagggacatggcacgcttcacgtcgatatgatcccgatggcgatattgcgcttggatacggtaatcgtgccgcacgtatccaagaacaccgtcgttcactgacaacgttattgcaagagtaccagccgcaagcggtcgcttgtgagacgccattcatcggtcgtttcaagcaaagcggtatggcgctcagcgagctgttttcagcgattcagacaacggttatcgattttgatcctacggtatctttcttaggggttgataaccgaagcgcaaaacgcgctgttgggattatgacgtcccgtgttggtaaggacgatgttcgccagaaagtgttgaacctcatgaacatcacacccagaaacggtgttgtgttagcgaatcttgatgagcatgcgatagacagcatcgctgtaggttatttcgcagccgaactcctgttcgaagaatggcgtattcttgatgaccatcgaaatgggaaggtcggtacaaaacgccgttag

SEQ ID NO: 813 - DNA, 1227 bp, Goslarvirus sp.
  source 1..1227: mol_type = genomic DNA
atgactaaagttatctggggatcagatgagaacaagaagtgtactcctatcattcgcggagcagagaagtgcggtaacaatgagttcgttattccgttgttgaattttgcgagaaaggatatccagatcgatgaggaaataatcaatagtttccttcatcgtgtaaacacggataaaccgaacgtggttgcgggtggtactgatgcagtaaaatgggagatgaaagctcagagagttattgtagacatcaatcgtgttataggacgagtgaaacgtgcgtggttaaaagacgatatcgtctatgctgttattcatctcaccgatcgtcccgaagcaatggcgtatgctagcatgcttgaagaagcgaccaacgatattgatgtttttgttccgtatgtgtgcaattgcccctcagtcaagatacggagtatcggcgaaattaccccaattgtttgtcttaataaaacaatccttttcaactggccagttgaaaaggaagacagatccgtgactgtaacagcggagcaacttgaacctgcagcagatgaaatagtgtcgccagcggtaatgcgaagcgtcatcgtgagcaactcaacattgaacaacgaatctatcatcctacgtggtattacaccgacggaagatggtaatgcgttagtagtcagaattccggaacttaataaccgtcgcgtgtttatcggatgtgttgggtatgaagttctgtactttgacgcccaaggtcgtgctgtgattgcgacaaaatcaaagttatttaaccagcataaagcgcaggcgtcagcaacccaaccatacagactagcgtattccgaagataaagtaacgatctggtttgtgaatggaaacgatattcttaataatgctttcccagagaaaacatttaaaccggtgacgttaatagaaatgttcggtggtgaggcatacttagctaattgcgttaatggtcagttctgtctaccctcctgctgtgggttcaagacggatgacaccattaccgtaaacaatgtgcgtgtatatttaataagaatcgacgctagttccggttttgcggtgtttgaaccccatggcacgattctcgaaaatcttaaagaggcttgtaagatctcagaaccattcggtgatgaacgcagccttatcatcgttaaacgtaccgatgtcgatcgggtcgagattacagtatcgcagccgataacggcgaaaacgaagtag

SEQ ID NO: 814 - DNA, 630 bp, Goslarvirus sp.
  source 1..630: mol_type = genomic DNA
atgtctcgtaataaatatatcgttattgaaggtctggattattcaggaaagagttcggttatctcgtctttacacagtcgtttaaacaacgtctgtgtcgtacgtgaacccggtggtacgctctacggagaagccattcgtaaacttatcctggaagatcagacaccaacgaacagattcgatccagaaactgaactattggcgatgatgtcgcaacgtaatcatctcttcaacaaggtgattcatccagcccttaacgaagggaagactgtgcttagcgatcgttcgattgcttcgacgtatgtttatcaggttaatgatgccaacgttaagttgtttgacgcattgttgccgaacctaccgtcgattatcatgccgtcttactatgtttatctggatatcgactatcctacgtatttaaggcggttccgtgttcgtcacgctaaacatcagatgtttgataacatcgatgaagcgacattcaataaacgacgttatcgttacatggattttatggactatctcggcgacgcgaaaacgctgcgtatagataccagtaacacacattctcctgttgatgtcgctaatcgtgtttacgacaatctgttgaatgcagggtttgttgaataa

SEQ ID NO: 815 - DNA, 351 bp, Goslarvirus sp.
  source 1..351: mol_type = genomic DNA
atgcatgattattcatcgtctgttaaacaaaaggttataaacatgagcaatttgaacgttgaatttacttcaacaacgcctgtcatgaatggtgttggcactgaaaccaaaatcgtattagaacccattccagggttacgcgatctcggtgatttttatccactgatgccgcgtatacggaaggccttaaacagtatcgatcttgattccaataaagatttccaacacgatacagaaaataccgatcatgtattgctgccatcagggatcgcaaaattcacctacacgcaaacattgaaagcctctgatggtgaaatccgtcgttttatcgttgaagtagaaagcgcataa

SEQ ID NO: 816 - DNA, 123 bp, Goslarvirus sp.
  source 1..123: mol_type = genomic DNA
atgattatgttactcattctaatggagagagcattgctggcgggtatctgcgcattctctgttaaacacgctgttgctatcatggctgaagaaaggcgtaatacgcataatgtattacgctga

SEQ ID NO: 817 - DNA, 822 bp, Goslarvirus sp.
  source 1..822: mol_type = genomic DNA
atggaaaaagtatttgtttgtaagttgtttaccaacggcaatagccaaccaatgtatctgaccgatcctgttctaggtaatcggaacagtaccgtattcaaagaggctttcgaatacgctaaaaataaagccgtgagaacactgacgtctgatgactgtatcaacggtatcacgtgggcagagttaatcggtgatgccgttcgacacttcgttcgggatgcgagaaaacgggaaatctgtctcacgactatcgttgtgcgtgaaaatgcagaaattttatcaaacgttttggttgattttaatgacgtttgtgtgtttaatccagagaacacgtttgaacaataccttactgccctgaacaaccagctcggtaaagatattcatcccgaattcgccaagttaacatatcagttactttttgacgacgtcgatccaaatacgaagatcgataccagcttatcgcccctggtaaagaaatacggatcggttctcgctacggcaacacccaccaccgatggtggttatgatatcgaattggatgatccattaaaagaacaagagcctactggggttagggcggtacatcacaacctcgtcgttaaatctgatggatgcgatgaacattacgctatgataaacgatgaaaacaattaccgtttaagtcaagcgattggtgttctacgctataccgaacccactgttgtagacgattatacatcgacaacaacgcacaccacgtgtttcattttcatctatcccaatgaaagtgtgtacattaccgactgctatggcaataccgtagatagcttacgtcgttattga

SEQ ID NO: 818 - DNA, 123 bp, Goslarvirus sp.
  source 1..123: mol_type = genomic DNA
ttggtaaacaacttacaaacaaatactttttccatgatagattcctgtttcaaagatgatgattccgaagatgattggtttaggctaaaagcctataaaattagctgcggttgcggtatttaa

SEQ ID NO: 819 - DNA, 660 bp, Goslarvirus sp.
  source 1..660: mol_type = genomic DNA
atggataagactttcagtctcaccgatgtggaacaacaatggtttcctatcgaagtgattgaaagatactttcgcttggctaggaaactcgacataccgcaacagctacaccgtttgagtgctcgtggatgggtaatgctgaaagccttacgtgtaggcgcaaaacgtttttacgctttcctgcacgagaaacttaactgcacatgtaaaactgaataccgccatccacgatggtttaaatcaatttcgtctcaaaaatcgaaggagtctatcatgaccaataaagatcagaaaatgaacaaccagccgtttgaaccatctgaaacgactgttgaccaagaatccactaagcaatcaacttccaaacaagaggaaaccaccatgaacgtacgttatgataaccttgaccgcgataccttagcccgcttggctgaatccgaaattcatcggaatgaagcagaggctgaatacatgcgtcgtatggctcttgatcaaaagcccgaccgtaaatggcagtatcgtgccggggttgcgttaacggcgacgagcgcagcagcaatgggcgctatcgctctcttctacctgaaacatacgggtctgtttgacggtttgttaggggaagcaaacctgatacaaatgaagaagctgcaagctaattga

SEQ ID NO: 820 - DNA, 528 bp, Goslarvirus sp.
  source 1..528: mol_type = genomic DNA
atgcaatacacattaatgatttctgttttggtcgtacttagtatcattgttgtttatggcgcttttgcgcttctgaatagcatgcagacaaccctgcgggttacccaattacattctgatggagcgagtactatgacaacaccactcatcgatttgcatgaatatattacccacaagcctgctgaacgttttgtgtctcgtcctgatccaatcagtgacgaagataaaggctatatcaccgcaacagttcaacgcaccgtcgaacgtatgttacgtccagtggagcaacgcgctgaatggtcaaatgacttagatgttgcaacactgatgcctgcttggttgtctgttttaacacaacaggttactgcgtctcttgaacagagtaatcttcttcctggtcgattcattattcgttgggaaagagacggtgataaaattgttctctacgctgatgcggatgtagagaacatcggtaaagtacagttgcccattaataaggtaaaaccgcttgccgactattgggtataa

SEQ ID NO: 821 - DNA, 414 bp, Goslarvirus sp.
  source 1..414: mol_type = genomic DNA
atggatacttactattggtatattggtatcggtacgataatttttgttgctgcagcttttgtcgctggcttttatctcggtcgtgggtcacgagagttcatcgttattgatacaagcgataacggaacgacaacgggtatctctgagtgtttgattgaatcattacgtcagctacatcgtcgtggtcgtggggttccaatgaaccccggtaaaattcagcgtaagtttaatgaactgtacggtgcttggttacggttacctgaagacgcgcatctcgacctgcggatcgaacagtctaacaaaaattactatttccattttctcaaccactacacccataacaggataacaacgattgtccttcccatcggctggattaccgaggggattgacgatgtgcatattaaaacataa

SEQ ID NO: 822 - DNA, 702 bp, Goslarvirus sp.
  source 1..702: mol_type = genomic DNA
atgaacccattaaaacgcgcagtgagtattattcttaattttatcccaaactaccaacgtactgaaagataccgtcattggtataatttcgtttaccagcctgtggtagaaggacatattgctaatctcgagaaagtgggaggcgataagaaatacttgatggttacgattccggatattatccgcaagatatacgaagaccaggaagaatttcctaacgtcgctgatattctgttgtttatacaagcatatcgctttcgtcttacaccaccgaaatctgtagtacgtccgtggtttggaacaaaaacagatggcgtggaacaagcgatgaaacaacgttttaacgaccagttcgctcgccatactcctcgcgcgttacgggtgatgatggaaatcctcaatcgtgctgatttatgcgtcattccgatgatcattgaatcggaactgttttatttgttcgataaacgattcgaagttaccatcgttgagtacggcgatggccttttggtattcagttacgttgattgcgatggcgttggtgatgttcgttacgttgttctagacgtagaagaccgctcgtcaacgatgacggcggcgcagttacgtcgattcgttgcttacctcgaatggcgtgacgaggacgacgaagttcgccgtaagaaccatgttcgccagaagtacgcgagattatctgcatcttaa

SEQ ID NO: 823 - DNA, 627 bp, Goslarvirus sp.
  source 1..627: mol_type = genomic DNA
atggctgtaacacgcatgacgccaagtcccggtgcggtcggggtattcacagtatcagcgccgtttaccgttggtgcgtcaacgctatataccgttacagcgttgcgaagattcagcgaagtcatcggtagtggaatcgatctatttacggaactgtacgaaccgttatcaatagacaaatccacattcgaagcgcatctcgaagcgaatgcttatctcgtcacgttgcaaccggattacggtgcacccgtactggtacctgatacgtatatcacgtcgtacccaaagaacgattcattgcggtatcgtcgcattattctgggtatcgatttcgggcctcttcctcccggtcttgacctttcgtatttaacaacgatattgaaaggtaaggccagtgatattcttggtgtcgaacctgaagttaaaacgatggaaatcactctcgatgataccgttactcaggaacaacatcagataaacgaagcccgtcgtcaggccgcgataaaagagcgagataccatatacgcacgttgtgaaacgcaagagaagcagataacggctttacttgcaacccaaaagcaacttatcaaattgcttcaagacgccggtatcaatccgacaccttaa

SEQ ID NO: 824 - DNA, 1377 bp, Goslarvirus sp.
  source 1..1377: mol_type = genomic DNA
atgaaatttccaatacaacttaaccgaggacgtcgaatgattagtatttttggtttttatacgtacaaagggtacgctaataaccacccaaaaaccacggcgaaattcggtgagttcagtcagcacagtgctacgttcagtcgcgaaatcggcatctataccaacacggcgtacgcacgtacgaccttattagtgttgaatgccgaaaacgaagctggtgaagcacaaacgctgaatgacgacaccgcaggccgcattcttcaggttggtcaatggttgctggaaaaagcctcatcaggcgaaatccaggatgaccgagaccaggttatcggctacctaaaagacgacttcacaacgtatctggattctatcgacatcccaacacccaccaccgatggtaccgtctatctaccggcgtggatcagtttcaagataaccgccaccggcgatgtcgtcaagatttggttgtctgatagcgtattccaaagtcaatatccaaaatacgaatatgaagtcgttccccctgttcctaaggatcagttagataccttcttcgaagatctggcaacattgaagaaactggttgacagtcgaagcagcgagaaactgaccgaagaaatcaacgaggtgcgcgaccaattcccagacacacaattgtggacgaaaacatataaagcgtacgattacaccgacgattcgaaatatattaataccgattggacggtgattatctacggtgcagcaggtaacaacattgataatatcaaggagttcctgcaaaactggattcttagcaatagcacgcacggacgtccagactgggaaatcgttctgccggatctttttattccgacggaacacatcttcattccaatctggaaccgccacagtgcgccagaaatgaccaatcaggcacgtatctatagtcctatattcgatgattcgttgatggatacctacctgaaaaactttgctgatggttacggcgaaaccgccgaagtccgtaaatcgcttcaagcggtgccgacgttgtggcgctcgatcggtttcttaagcgttggtaactcacgtaaccgagacggtaaacttaagttctacgatcgttggccgcaatacgcgctcatcagcacaaccagcatcgatattaaccgtatcgatgatgcgacacgtgaattcatcacgttcacttacgaaatgctgaaactggcagaatcgctgaccgaagacgacccggtaccgttgggttatagtcgtgttacgcgtggtagcaatagcttcttagcgaaaagccacaacgatgttcagtatctcttcttaacaaaagaagcgttcctgaagaaaatgccggatgaagccgacacgcctgttggaggttga

SEQ ID NO: 825 - DNA, 552 bp, Goslarvirus sp.
  source 1..552: mol_type = genomic DNA
atgtttactacactcaaggcgttgccctggcttttcccttttcttcgcgagttgtttcggcgaagtaagcgaccgcccacacgctatcgtcgagatggagctcgacagtcctcgatattcttgattacgggctttttcatcgtattgggtatcgtgacgttattcgctggcgaaaaaatcattaccttgatggctgacgtgagtagtttacgtcaggaaaatgcaacattgcgttatgcgcgagacaccaaccgagaactgattcgtcaactttacacatcgaacgaagtacgaggccgtttaatcgacagtatggttgaacagaaccggattctccagggtgaggttgatcgagcgttacgaacttttgaaaaagagaaagttgacgagagggagtttcaagaacgcgttgaacgttttatcgatacctattacgtctgtaatagtctgacctccgccgaacaacgcaatcaatgcgtaattaacggtggaaaactgcggtcaatgaaagtcaatcgcgatcaaccgacgtcaaccgacggtaatcggtaa

SEQ ID NO: 826 - DNA, 1527 bp, Goslarvirus sp.
  source 1..1527: mol_type = genomic DNA
atggcaggaaatactgagctcggtgccgttttctactgcgatggaggatcccgtccaacatcgagtgggtatggtggctatggcgtgcacggctacacctacgatatggtgaaagaaataaaaggcaccttggaaccttcaaaaagcgggaagcccaaaccaacgcaatacggttatgttgaccctaaactcgactttcctaaagacgctgtgctggtcgaacccaaggaatacgtggatgagttagaggctttgggtttcaatgtaacgaacaatcaggctgagttggatgccgcaatacgtgcgattgaacttggaaaagcaaagggggcaaaacggatccagctgttgtcggacagccaatatgttgttgtaggtgccaccaaccatcttgctaattggcgagagaacaactgggttaaatccgacaataaaccgttaatgaatgcggaacggtggcggaaactcgatagcgcgataagggatgcgaagcgcgacgctatcgatatttcgctgcgctatgttcctggacatgagggcaatgttggtaacgaacgtgcggatatgttggcaacgcgtggaacatatctatcacaaaaccaggactgggctgtaagaacccaaatacgccgcgaacttccggctaaggggtattggagccccgaaccggaaataagcccgttctttacgttctcacgctgctactttaccaccaaccagcagcaagagcgtgcgaaagatggccgctacatctatttcggtggtaacaccgataaagacaacaagggacgtcttgagttagggaaaaggattagcgatagtgcgtacagtgttatctatctaagcaagccggatgatgctgttgagattatgcgtacgcatgcatctcgggtattagagcatgggacaacggagtcagtgtatatcgcatacacggataaccttcatcatcgtcaatatcatcgcgatattcttgagggtgagtgcgatcttacgatgcgtccgacaggcctcggtaagagcgtgcatcttccgctaggtggatccaacacagccattttaatggaagcgtgcaacccgcctaaccttgcttggcgtgcgattgattccttgaacttcttaaagacgttactggatgaatggcttgacgctaaccgcgaatccacaccgcgtctagtcgtaaccgaaattaccgacgttcttttcgaaacagaaaaggataagaaaggcaaaacggttaccaaagtgcatagtgcgattacgcaggttacgaaaagcttgaaggtggacgtgaattacagactgacccccgataagcagggcgttacgtcttgtaccatgtccttggggttagacctgcctcaacgtctgaacttgagctatttagcatcaccggaaacgaaagcgtacgcggtaacatatcgcgagtctgatgttgcgtttcgtttcgctgtgattattgagtcgggagacgacgttggtatatgggctaacatatacagtaacccacgttatgtgttggagtaa

SEQ ID NO: 827 - DNA, 432 bp, Goslarvirus sp.
  source 1..432: mol_type = genomic DNA
atggtgatggtcgaacaggtagaacgtgagaaacaaccgttgaaacacgctctcctatcgttcctcttaaccgcaaaagctaaacgcatacttctcttcggaagtttgtatggtaccctgcaccagcatgacgataattacatcatgctaaaaggtcttgcggatatgaatgagcgattggagatagctgagtcggtttcagcgttgatgtttgctgcgcgacttggtattactgcatggaaagatctggatagtgagacgttacttaatgagacgacgaactacgatgaagccgtgcagtgcataatgcaacgcgttccgccatggctttattatgatgataaagcaacgattcgtcaggagattaaaaagcttctggtaagagtctgcgttcctacgacacaacgagtggtacaactatacggcaaataa

SEQ ID NO: 828 - DNA, 843 bp, Goslarvirus sp.
  source 1..843: mol_type = genomic DNA
atgcataaatttaccattcctgaagacccgattacactgcagaccctttgggattcacatcgtgctttatcaatggaaggctttgcgcaagacttcgcttcacttaccgcagtaacgaatcttcgcagtatgtttaccaacggtaagaagtttgttaccgattggcttaagaaacgtgatgtgacggtttatcctaaagttttcgatgacctcgatacgatttttagcaacaacgcttacagcgatctcattgggtatcgtgcttttattccgaatggtttaaatgcgccgatgtcagattatgttgttgctttaactcagagcctggatagcgtgattggcaccatcctacctgatttggataagttgaccgtaacgtgcgctaaagccgtcaacgacgttaacttccgtcgtagtagtggtatggctcaaacgctacctaaaaacgatccagagaacgttctagagacgttacgtgcgatgttcaaacaagggacggtaacacagaccactgtaggccgtgcatataagaacgaagatgatattcgtcagatcggaaaagatctggatgcttcccgtatccgtgcgcttgacgttaatcctaaagacgtgaagaaggcaatcgaacgtttcatggaggtagctgaccgtttaaccgaaatcctggttcaagactacaatgaaggtgcggtgagcaacgcgatgattcgcgatattagtgacgctatctaccaaacagccaagcaggctgaactgtatgcgtttctcgtgaacgctttggctgaggcgatcatcgcatataacgacacttgggacgccgttaaaaagaacgcgaaaaaataa

SEQ ID NO: 829 - DNA, 1491 bp, Goslarvirus sp.
  source 1..1491: mol_type = genomic DNA
atgaatcttaataagtacctttctcctggtgaagagatgcgttttaatctcaacattggttgcttaatggatattcccacatctggtggtcggtactatgtcggtaaacacggtgaaagcatttgtaacggcggcatgatgcttgttgagggcgcaggcgctcgcggcaacatgaacaaaaccacgttcataatgtttcgcttgttacgcgttatcgatcgttacgcaaacagcaatagtagcgtttacgacacagaaatgtcgttaacgacaacacgtatcttaacgcttgcgatgaacatgtctaatatcgcaggtgtcgatcttttcgaagaagaacgtgtgtttatcaccgatgctgttcagatgagcggtaacatttggtttgatgcgattaagaaattccgtgacgacaaggtcaaagataaatctcaacgcaaagccgttccgtttattaataaacacggtgagaactatacctggtggttgccgaccgttgtactcatcgacagtttctctggattaccaatcgatgccgttgatgcactgttcgataaagaaaccgcgggtggcgcaaaactgaatgctgaagcgatgcgttcagcagctgcgaaaagccagattctatcacagatgccagtactcacagcgtcggcgggtatctacattaccatgaccgcccaccttggtgacggtgtaaacgttggtggtatgccgggacagcaaccggtacgaaaactgaaagggtttaagggcgatgagaagtttaagaacgtcccggaacgcttcacgttttatacgaataacctctggaaaatcgataaactgacgattcttcagaacgcggataaacgcgtcctttatccgcgtgggcctggtgacaaccttatcggggataccgatctgcagttgattcaagtctttaacatgcgcgctaaaaacggacccaccggcttaccgttcccgattgtggttagtcagagcgaaggggttaaaccatcattaacggaataccactacctgcgtgataaagattggatgcgtggttggggtatgcatgcgtcaggtggtaagtcagctgatggtgcttcaacggtatatttggatatttatccggatgttgcgttgcagcgtacgaccattcgttctctctgcgaagaggatgagtatttacagcgtgctctggaaattacgtcggagctgtgtcaaatgcataatctctggcgtcaagaggtttacgaaaacccacagctgtattgcaccccacaggaactgtacgacgatcttaaagcaaaaggtttcgattgggatgtattgttaaacacgcgtggttactggacgtatctggacgatcctaacccgctgccgttcctgtccacaatggacttattgcgtatgcgtactggtgagtacttcccgtactggatggatgaaaagacaaagcaaccaaagaacccggtacccgcattgaatcgtccgagtaaaaaataa

SEQ ID NO: 830 - DNA, 321 bp, Goslarvirus sp.
  source 1..321: mol_type = genomic DNA
atgaccgcacctgctatcaagcatgcacatgaactgattgatgttatcacgcagacaattgcgtcacatcaaccagcgattgctgagcaatttaaacacgacctattggctcgtgttcctgagtacatgacattagaacatacccaagctgaaatcaatcgctattggcgactacagtttggtgtattagaagtaagtacgttttcggtacgtgagtgcttactagacaaccaacccattaaaggatggatccataatttccgtgattacgttgcaccctttatcgcacgcaacgtaaagtcattgcgcggtggaagataa

SEQ ID NO: 831 - DNA, 327 bp, Goslarvirus sp.
  source 1..327: mol_type = genomic DNA
atgaaccagatgttacacaaccttcctcacgacaaagttcatctcattgctggcggtgcgcattcaggcgctgatttgcatgtgcgccgctacgcgaaggattacgggtttaaatacaccacgtttcctgccgattgggatggtccttatcgtaaaggtgctggattcagacgcaatgagtggatgggcgatgtcattacgcatttaattgcgttctgggatttcaaaagtcctggaacaaaacacatgatcgacatcgccaaccgcgaggacaagaacatcattgtccaggtgtttcgggtatttccgcaacagacacgacaatag

SEQ ID NO: 832 - DNA, 675 bp, Goslarvirus sp.
  source 1..675: mol_type = genomic DNA
atgtccaaccgcgctgcagcagaaaaattcattcttgggtatatcaaagacctggtgggtgaatcgagcccgacttacgctatttacaaaaaacgttttgctgaaatcgatgatgagacgtttgatgcctatatgcgtttatgtcgggataagaaagagattctacccatctgggtacccaacatgaacaaaaacgaggtgacgataaaacgtgcgttggaagtcggtaagaaatacggtttccctttcttccaacgcatttatctcaccgaccagaaaacagggcaattggtgcttcgtgaccgcccaaccagattgtacctgattccaaaccgccgacaagccgaaacgttgagtgctaaaatttcgattccgaaaaacaacaacaccaaggaccagctcaccaatcagccgacgggtgatagtaaaggttccacttggagccagccggaaatgcaagcgacgttaggacggtcgatgccgaacgtgaaccgagagctgatacaggctcgtggtggtgacgataagaagttcaacgcgatgaaccgcatgctgttagaaacaggtaccgtaagcttggagcagctccctgaagacagcaaggcaaaatcggtttcggcggttggcgttatcctcaccgcgatgcatctccagaataaccttgatgagggctaa

SEQ ID NO: 833 - DNA, 708 bp, Goslarvirus sp.
  source 1..708: mol_type = genomic DNA
atgttacgtggtcggttatcacgacgtatcgcagaaataaaacgatcgttctccccagagagtgatactgcgttcgagcttttattagaagagcttgcttccgatcgttacgtgcttgttttagatgcggcgatgcgaaaggaagttatcgcgtacacgaaacgctgggtgtatttgtattccccaccgcaacaatattccaaaggggcaacaattcgtgactgggttacgaaattcagtgtgacgttcatccatgatttgtttatccctgaaaacatgatccgtctttggcgtgaactccgttctgaggaaaccccttcgttaatgggttttacgatggacctcacaacgcatgttcgccgtacagtgttctcaactgtcgatgacatcgatatgcttatcgatcatcttgctggaagttttgcatggatccatgaaagcaatcataaactggtggatggtatcgcccgggatttattcgcggtagacgaacagttctttacggaattacccaccattgatgatattcgggatatgcttcgtgcgaatacctggattattccgttgctttatttgcataccgtcaccgttgaagaattggaagaaatcggtgagttggtattcaaacaaacaaaagagtacgagaagaaaattaaaacgtctcccgatatgcagatgttaaccggtgaagctggagagcaacgatga

SEQ ID NO: 834 - DNA, 789 bp, Goslarvirus sp.
  source 1..789: mol_type = genomic DNA
atgactggaaatgcggcgttagtgacggtgtacgtagaactcgaggcgctgcttgatatcgaaatggcggtagcaacaacgttggatcctgaggctatcagaaagtgggggaagaaatggcattaccgaccctataacctggagccggaaaagcaggcgggtgttacttacacttacgaagagtttaagggtgcgttggcaaatatcgatgaaaccattcttgataaatgtattccgacggagttgatgtggcgattatgttacgtggttgcggactacatgaaagaccgcttgacagggattgccgcaccggatttttcggttcatgtgaatacgtacccgtttgaatttgtgggagatgctgcaattgcgttaaaagaaggcatccagcaatacctcggcgcgcaagatagcgttgagattatttaccgtcatccggccacactgcatccgtcagaaatccgtaagacgtataatgcgatgttcttttacgatttcaaacgctggcacctccccaatcagatgctgttagaagacaatccgatttgtaacgtattggttgtagccagacgaatcagtgaaaccatccctgattccgatctggcttatgacaaactttacgaagcaatcgaactttctaacgcgcctgtgatgttcatgcggttctttggaataaaatggttcagttattttattcctcctcgtgtgacgcctccgaagactgatgatctgcagccatcttctgagatacctcctcacgaaccgacgccgtcagttgagccattctag

SEQ ID NO: 835 - DNA, 630 bp, Goslarvirus sp.
  source 1..630: mol_type = genomic DNA
atgagcgaatatggtgttgcccccgtagatgatgaaccgcaagaagcacctgataaattcgaggtccgtcttgacgaaacccgtaatatccgccaacgatttattcaacgccttgaaatgctgttagatagcgaattcaaagatttcgagcttaatcctggcgctgataacaaagccatcgtcgacgtcgaaaacgtcgaccgaataggtaagctgttgttgaaatcgttgggcgataacgacaaagtcgacttaacgttgaaacgtatcagtgccgaccaggccatgaatgacagcgcactgaaaacagcacaagccctaaccgaaaccatgctgcgccgcttaggtcagatggatcaacatcctctcgcagcaggggctgtttatgaaggcgaagtcgtgaagccagtcacgcctgaagaacgtgatcgtcgacttggttttgcgtcattggaagagttcgatagcaaggagttctcaccaggcgttctcatccagggacgtgtcgaagaaaccagcgatgctttctatgctagaatggctcaactgacggcgtcggttcgtgaggaggtatctcagaagatggctgcagatcatcagtcttcggaggcgtcacacgaggaggaataa

SEQ ID NO: 836 - DNA, 99 bp, Goslarvirus sp.
  source 1..99: mol_type = genomic DNA
atgaagccatcacaagaaggtaacgttatacgtcgccttcatgactgtcatcatgaaggtaatatagtcctgttatttttttcaatacggagaatgtaa

SEQ ID NO: 837 - DNA, 516 bp, Goslarvirus sp.
  source 1..516: mol_type = genomic DNA
atgttacatcgctttttcttgaggcgtgcgttccaacgttataaaaggaagacgtttcaagatgataggcaacggttaaacgaactcttgttgctttacaaaacaacgtcctgggttcacaacatctacgatatacgcgttgcacgtaaaacgtatttaccgttgtggtatatggacgctgagtcgttgatgcttgaccttcgccgttggcatcaagcgttcgataacgaaggcaacataaacataatcgcattagaggagagaacatatgcaatactagcaccacaaatcacgttcaatcgttggcttgctgatgccgatggccgtgttatccggttcgacgttctcatgcgtgacgttatcgagtatggacgcatacttgcgacgtggttagacgcgctggcggaacgtgacgatttggatgcggcttatggattacgcaaaacaaggaaactagcgagagactgttgcgaactcctaaccttcgcactcagtcagtacactggtgtattatga

SEQ ID NO: 838 - DNA, 513 bp, Goslarvirus sp.
  source 1..513: mol_type = genomic DNA
atgacaaataaatataatgaagtctctttccgcgcacgcattaatccgcttaagcgtcgtgatgaaagcgatgatgaaaatcctcaaagcaatcgaggacgagcgactaactacaatcacggtaacaatttctggacgcctacgggtagacaggatttccttacggagttcctgttgcagatttatacggagagagggatcggcgcaaatcagctcaattcgtatattacccgacatatgcgtgatgtgaagaaacgacaccctgataaaacgaataaagacatttccagtattcggggaaacgtcattaaggagttgaatcggggatcgatgccgttccgtaacttcatgaataaactacgcttaattcgtgcaagggaagtcacgtttacgatttccatcacagatagcgtaggatatacaaccacgcatacgaaacggtattttgatgcaacaattcctgttgacgatccagatgctgaatcattaggttcagaaaacgaagaagtttaa

SEQ ID NO: 839 - DNA, 1068 bp, Goslarvirus sp.
  source 1..1068: mol_type = genomic DNA
atgagtctttacgacaaactgccgagtatagatacgtccaagatcaaaaccatcaccagtgacttttcgacagggcgtgatacgctccttaaagcggttagcggtaccgctgtttcagcggcggatgcattaaccagttttcgtagcagtattacgaacagtatcaatagtacattatcggcgttaacaggaaacctgatttccataagcgatcttaattctttcatcgatatcagcggaggcaaaatctccctgaatgaaaacgcgttgatgaataagatcaaagatgttactggcctgaatatatcgtcaaccgataacattctatcgcaagtaaaagaccagatttacagtaccattaaccagcaatccaatggtgcgttagggaagcttattgataaagatggaaacgttaagcttctcgatagtctgatgtcgggcgatgagtattataaactttcaacgaatgtcgatcggtatctcgacgatcaagggaaaacgcgaaccgaattcagttacaacgactataagacgaaccggacagttgtcacatcgttgattcgtcaagccgcattagcaggcaactacatcgatgtgcgtagtctgtatgactctgggtcagcggaggataaagtggcgatggcgaccactttagcggaatcgttaagcagcgttggtcttaacggcgatttccgtacagctgctgtgatcaccgaacttatcacggctgaacgtgcccgtagcgttgtccctgaactcattacgttactgtttcgtaactaccgcattccatcgtacattacccttaaagaatacgacgctgaagcctcgcgtttaattgattttgccgatgcgtttaaacctggatggggtaaaacgaactatcacggtaacgatgcagaactcctcacgatgtggatggaaacatccagtgggttctattctcttttctctcgcagtaggaaatacgcatctcttgctgcgatgggtaagaattatacaactaccaccacgatggcaggcttgaagaaactttatcctgatttaccgacggtgacgttaggttaa

SEQ ID NO: 840 - DNA, 2142 bp, Goslarvirus sp.
  source 1..2142: mol_type = genomic DNA
atgggtattcttgttcaaaacgccctaatcaccaaacaggcgtttttattaccgggcgatagcagcacgcttagtgctgacatgattaaagcgagacatacaccgtattcctacgataacgtcgatgataccaccttaggcgggaactgggtgcttaacccaccaccgcaatataccaaatttgccgacatcaaggaacgccgacgtgcggttatgcctggatcaacgggcatgggccgaggctatagtgaaagcattaacagctttaaagaggtcgttacgttacgattcggtaaacctcgctttacaggcgcaagtatcttctttactgatttctacgatgccgatgttgccgtaacggttaaaaccggtcgcgatcccggtattctttattacgcagccaaagcgtataccaccgttctttcttacctcacacctctaccctacttgtatatggttggacgtatcggtcgatatttcctgggtaagcctaccagtcaatattactatcaagtaccaaccatgcacgtgtattgggcgtctttccaaacgctggtaaaccaaacagcgataaacatgggtcttatcgccggtgccggtaaagataaaggctatgtggaagaagggggtaccgtactccaccaatattcaatcggtggtcagaacgttgaagaattcatcaactacgcctctaagacgctaccggggatttataagaaaggtggtgggatcgatatctaccagatcgcaacacgacgtcagcgcatacagaacgcatgggtacgtcgtattcaatccatgatggaaaacgattactcgtcttacgaggagttctggaacgatcttgataaacgacttgatagcggagcgtttccatcggatgtaaccggccgtacgctaacgcagtatctcgccgatacgcagaagtctgctgtttacagtgcgacagctggtgataataaacaaacgatggacgaccttttattcggaagggcctcatacaccaacaaggatgctgatgccaacttcaaagtctcggcggctacctccgacggtggtacgtcaacacagagtcagggtacaacagccaatgtcggtaattcgacgtcagggacaacgcaggcttcaacaacagcatcaacggctggaggcgcgaacgtacagagcaaaggaatcggtcaaacgaacgcagccgaagaagctacgtttcttgatctgatggatgctgaactggccgatggtgctcagtttatcagttttcgagtcgactctgtcaccagtgtaaccgaaacgttttcaaacagcgcttcagaaagttcaatcgcacagacgatgaatagccgtgcacaagcgaacatcgaacgtcgtttcaccctctccggtggtaatacaggttgggctgtactagacgaagccatcaaagccggttccgatctcgttaatggtgctatttccgggatgggcctggatggtatttttggtgccttcatgggttccggcttcgccgacattccgaaattctattccggatcatcggtaagtcttccgcgtgcagatctgacgatggaattgcgttcctggagcggggaccgctggtcgatctttacgaacctcatggtacctcttttagcgatccttgcaggtggtttacctcaggctaccggtaaatcgtcctacgggatgccgttcatgtgtgagtgttatattccaggtaaagtccagattaaaatgggccttatcgataatatcactgtgacgcgccatgttggaaacgtaccatcaacacgcgagcgattaccgttggggatcgacgtcagcttcagcgtttatgacctgtcgtctatcgtcgccatgccgatcacaacgacggccgcatcgatcgcaaaattggatcctcgtggcttcttaagcgatcttcttgctgacgatacgccgctcaacaactatcttgctgtattatcagcattgacacttacggaacaagtttacattattccggatttaagtcgtcgcatgcataaaaccatggctgatatcgatagtttctggagcaaaggtaattttgctagctggttgtctgacaccatgcctggcaggatagcatcagggctgttatggaaacgtacagaacggccgttctga

SEQ ID NO: 841 - DNA, 6666 bp, Goslarvirus sp.
  source 1..6666: mol_type = genomic DNA
atggtagataaaacccgtgttgagggtgatgataattgggacaactgggatgaagacttctccctggatctcgattttaacgaacccaaagacgatcgtaaaccgataacacgctttgcgataggagcggttaaaggtgctgctgaggatcttacttcctacgaaagaatgaaggagatcgccagaaacgcattgcctaagggctacagcgacggtatggatcttattgattccgccgtcggatccacgaaggaactatacaatgaagccgttcgtgacgttcttcctaaggtccaaagctcaaaacggttagccgcacaactgaccaagaaataccgtgcgagcatgcccgatttctcgaagaaaattcttgagcaatgggagcgagaagccaaggaagaagacgaacgtaaacaagctgaagaaacccttcgtcaacgcatggcgagcgcgggggacgatgagatcgcccgcaaggttgccgaggcattaggcgaatcagcaaaccaaagcgcggatcagttcgctgaacagcaagcgaaagagagtatccgtgacgatatcgctgacaaacggtacgctgtaaccaacaaacaaatgagcgcgatgcaagaaggcgtcgccaagatggttggtttcaacaacgaattcgctgcacgctacatgcgtaaaagcctggaactgaaatatcgttccttagcgattcaacgtgcaagttttgatcagcataaaaagttagccgaagtctatatcggtttattacaaaacatccagaagaatacggctttacctgatgcggctaaagcaaaaatgtcggaagaattccgccgtagcgcgtaccaacgtttctttggtaatgcgttagatgcgatgagttctttcgagaaccgtttctttgccgatgttaagaagaaccttgccaccaacgcattaggcgctttaaaaggtgtcgtgtccggcgcaaacgatgcgttatacggtttaaacgaagcgcgtgactcgttgtccatgatggacgggatggggtcagaaggcgatattaaggaaatgcaaggaaagatgttgggtcagttcattggctcaactgtcgcgccgtggatggctaataaaggcaggatggcgttacgcgatttagcaaaacgtcaccccaatgctaaattcgctagcgcgttaaaagccgtggatcaaggtggtgaggctgccgcttacacgacgcgtaatctcggtaaactgctccaggaagatattcgtaaaaacgaattcaatcttagcgatccgttttacaagcaattgttacgcggtgcagggcgttgggcgttcaacatggacagcggacgtaacttccgcgtgatgaacgacaccgctgaaacactggcggagcaaacatctttcgacggtttaacttaccgcagtatcaatgaagttattcctggttttcttgcacgcattctgaaaagcagtgaaggtatccgcaccggaaacagcgatcctgactacgaggtctatgacggcatcagcggacaattcgtgtctcagcgcacgcgtgaacaaagcgtcaatgacacgctgtttaacaaacgtacatttggttattacgccagccgtttcaacgaggttatctcggtcatcgatcccgataagcaattatcggaaaaagccagaaaggcgctggccaagcagttggcgcgagatagcgacgcgaacatcgcattcgacccggctcgttttacggatgaaagcaacttcgatcgtagtattgaccgcgacgctattaaggaactttccacgtactttcgtgaccgttacggtattcgtgatgatgtcaacgataagggcgaacgtcatcaggtcattggaaaccgcgggcaatattacacggaacgtaaccgagccgatcttcgttacggtcatctgaaatctttacaaccggatatccagcgtaaccttaacctgctgaaacgtactggtgacgtccaatatctggaacggattgggattgtaacgagaaatagcgacggaagctactcggttaatcacgatcggtatttctctgaaatcgatcaatacatcgaccgaccggagtacgctgaccgcggcgatgtcaatacgcgattaaccgctcaggaaacaagagcgctggcgctgggttatcgtgacgcaaaaccatcagctggtgacgtccaaaatgtcggcctgccgaacatcggtcgtaaggctgctggaacagtaaccgttgatgaaaacatcggctacgataaatggtggaacgacacaggtgttatcaccacatcgcttgaagaacagaatcgagcgtggcaagagctttatctcgaggcgttgtccgaagcatccgaacaacgtgttgaaatgcttgcgctgctgaaagccatttctgagaaagactggtctaataacgtttcgctggatggtgaagatgtacctgaaggtacagcacccatttcatttatcgatcgtgccaaacaaaaactcggcggacgcaacctgtttaaaggcggccgcaatctcctctggaaaggaattaaaaataccgcacgtttaggtgttaaaggcgcacgctggggtgcagaacgcacgttgggtagtttggtaaattctggccgacgcattatcaatttcaaccgcttcgtgttcggcgcattatccaaggttgatcaggttccgtttgacatttacgttaaaggggaatcccaaccacgcatactggctgccaaacttcgtcaggggttatacttcgacgaagcgacaggaaaagccgtaaaacggatgaaggatatcaaaggcccactcgttgatgcggatggaaacatcgtaatcagcaacgaggatatcgagaaagggttggtcactcgcgctggtcgtgcctttgagaattcaggacttaaagcatgggcacgtgaaggtcttaatggaataacgacggcattaagtctcccacggatgttaaaacgcggtgcggttgagatctacaaacagcttgacaaaacacccgacgtttacgtcaagggagaatcaacgcctcgtctgttgtccatggtgttagcagcgggtgggtatttccgtcgctcggatggacaagtcatcaaaaatcttgaagacatcgatggtgatgttgttgatgcacaaggtaacgtcgtacttacgcttgccgacatgcagaaaggacttgtcgataaatacggtaaagcgattcgtcgtttaaaagaaaaactcatcaacttcggtgtaaaagcttttacgttaccgttaacgttgctacgtaagacaaaggacatccttaaagcccttccaggtaaaaccgttaacggtctacggcggatgggattaaatttccaatcacccgacgcattactggtgggaacaacgtcgagcatggtagatcgcctcgatgctatttaccagcttcttgaccagcgtatgccgggaggtgataaggattaccgcgattggaatggcgatggtgttcgagaaggatcgttggaagacctgaaacgtaagcgtgaagccaaggaaaacggtaaggatgacatcggcaaagattccaataaaggagaagaaaaggagaagaaacgagggttactcggaagccttttcgatatgctcggtgataccgcaataggtaaacgtctcatggcgagtccgcttggaaaaattctgggtggtcttggggcggtgttaagcggcggtgcgtcgttaactgggttgttgggcaaaggtctcattagaggaaccggcgcgctggtcaagggaggactaagtgcggcaggatggttaggacgtggtgcgttaatggcgggtggggccgcgttgaacgccgttggtgggttatcgggattaggtgcattcctcatctcacctgttgggcttgctatcgctggcggtgcgttggctgcttatgctggatggaagatctatcagcatttcgccgagaagcctgacccgatgcagaagctccgtcttattgcatacggtgcaaaaggggatgataaagacttcaataagaagctgcttgcgacagaaacatacctcaccgaccatgtggtcatgaccggggataccatcggattcgatccgaaagccgattctgaaaagattctcgaaatctgggaattgtctctggaagattccgaccgaatgaacgaatggaaacgctggtatctgcatcgttttattcctgttttcgctcgtgcgtacaaactctggaaagagcatatgccggacgagaagaaatacatggaaatggataaatatccgaacggtgagaacaaagtgaaatggtcggaagcgtttatctggccttccgatagtcctgatggtccgtattacgtcgaagctaacccgttgggttcttctggtgcgacgcgttatattgctggtcaagacgtcaaaaccttgatgctgaaacagctcgaagccatcaagaaagagtaccagaatcagattaagcaatacactcatgatgaggctattgctgattggtcacggatgtctgacacacaacgtaaatccgttgcgcctaacgcattacgtggtcagaaagcgtcattacgttttaacgataaacgttacaacagcgctggtgctaaaggacgacagaaactggatgcaaccgcggttattgaaagcgtagaccgccgtggtaggaaatgggttgccggtggatacatcgatgaactcaccagtcttcgtgttcgtgcgtacggtattaaggttccgttgttaagtcagataaaagtgctgatggaacttgaagacgctgtagaacctggcgttgtcgctgaaggtaaaggtgttaaatacggtggcgatcttgtcgcgctctacaagaaattcgcgacgaagttcggaagagacgttaacagcaagcatgatcaggatatctggtttgcttggatgaacaaccgtttcctgcccgtctttttaacctattaccaacaagttagcgacatgggcggtcaaggacttctgtccgacgtggtacagaacctgaaagacagccaacgttgggaaatcggtgaagaacttgtcgcagcgcaataccgtgatgagaaaggtacactgcagcccgtatggtcgtggaacagttgtggtttctccggtactgaagctaacaccaccagcagttcaacaaagagtcagctcgatctgttaaaagaatatgcggataaagagaaggttcgtgagaagaacgcggaagcatcgcaagaggataccgataaattatcgaagatccaagagctgatgatgaagcaggctgggtacgagaagaaagacggtgtctggcagaagaaatctcgcattaccggcgggatgagtaactccgaagcgaattacaaccccaatgggaataaggtcggtgcaagcagctttactgcttcagctacttccagtgcgggattggggtcaaccggcgatcttaccggattgcctaacatgggcttacagaaacctgcaacggggccaggtcccgaagctggacgtcgtgcgcttgttaaatccgctgtgaaacgcggtattaccgatccaatggaaatggcgatgttccttgcaaacatcgaacatgaatcggggaactacactcacgtacgtgaggggaactataagacaccagagcgtcttaaacaggtcttcccttacaaattccgtgatgtgcaggatgcagcgcagacgattagcatggggccggaagcggtgttcgaacgcgtgtacggtaatcgtaaagacttagggaacacgcagaaaggagacggggcgaagtatttaggacgtggcttcattcaggttaccggtaaagctaactacgctcgtctgtccaagaccttgaataaagatcttgtcagcgatccatcatacctggaaacgccggaaggtgcggcggaaggtagtgtcgcgtggtggctcaaccgaggcaatgtgttacgcgatcctgcgaaacggggtgatgtgcgccaagttcgttatctggttaacggtggctataatggattacgtgacgttgaacagcgctctgcttattggattcaggcggctaagaatggcaccctgaagaaaatgatggatgagttatcgggatcaacatcaggcgatcaagctgaaggaccgactaccgccgagcaggtgaagaatgaagcagcccaagaggcaaacggaacgccaactgtaagcaacgatccgcaagccccagcaccttcaaccacccctgaagctaaaccgtctgcggctgccggtacggctccagcacccggagaagcatcaccagcgcctggaagtttcgaaacagcgaaagctgcggcaggacaaccgacatcaacgccagcacttagcgatttgccgtcaaaccctggcgcaaatcgagggatatcggttccgaatacgcctgcacaggtcgcgcagtctgcgacacaaacatcggccgcgagtgagaacttctacggtagcgcaggtgaaattctccgacagcagctgaccacgcagcagaacatcgagaagaacaccggtagaacgaatgaacttatttcggaattaatccaagccgttaagggttcttctatcggtaagggttctgcaagtccttctcaacaacaggcgatgtcgctacctaatcgtccgcaaggaatctctccaacacggacaaggtacgcgcagtag

SEQ ID NO: 842 - DNA, 219 bp, Goslarvirus sp.
  source 1..219: mol_type = genomic DNA
ttggaacgtgatgcacgaagtttaccttcggcattgataatgttgaagcgtaacttcacacatcgcccacctgataaaatcaggcaggtacgtaacctaataacttcctcgcctcaagcaaggaagcgatgggtgacgccatcacccattacgtctctcgtgtgttcagatgataccgccgcagccggtggtggtaaagaggagtgtctccatggctaa

SEQ ID NO: 843 - DNA, 1647 bp, Goslarvirus sp.
  source 1..1647: mol_type = genomic DNA
atggctaaagtcagagagccgtttaatattagtattttacacctcgataaacagcagttacgttttctccccaagatcacgagcatgagcattcgtgacccaagcaccggtaatttccacgatgatggtttctattcttacaccatctttggtagtgcgggtagtgaagatcgagaccgtcgatttgcggtgattgaatgcaaggttgaaatcctgcatcctgtcatttacgaccgtctcattcgattaaaacacctctatggcgatatcatgtcggggaaggcgtacgctcggtgggatcccgaacaacgcgacttcgttgcgtctgatgcattaacaggacaaacaggatacgggttctttgcacaacacgtcgcggatatcaagttcgtttcaacgggttcagctcaacgagagctacgaattaaagttgtcgaagagaacatgttcaaagcgatgacccgtcacttactggtattgcctgcaggcttacgtgaaatagaagtaaaagaaggtgggtatgaaagcgagcaagaaatcacggagttgtatcgtcgtttccttgcaatttctaacaccgtccctgatggattaaaagattattccgatcccgtttacgacggccagcgctggagcttacagagaacattcaacgatatctacgctttactgttggatatgttccagggtaagaaagggatcttccaaggtaagtttggttcacgtcgcgtttggaactcaacccgtaacgttatttcggcaattaaccccacaacggaggtattagggtcgcctaaccagccttcctgtaccgcggttcagttagggttataccagatgagtaaagccgctctcccagtaacgcaacatgcgttacgtaccggtattttgcaggaaatatttgtccgtgatgttacagaagttgaacttattgataccgaaacgatggaacgtgagcgcgtcacgcttgatccagacaccatcgatgactttacaacatgggacggaatagaacgtttactgaacaccttaagcgatcctggcgtgcgtaacgagcctatcatggtcaatggacgatatctttgcctcgtctatgtgaacaacgattcgtttcggttattccgtgacatgagtgaattacccccggagatgttgaataaacctggcgcggatgttcaccccattacttacaccgagcttatctatattgccggatataagtactggaataacctggctgcgatggtaacacgttatccggtatcaggtatgcaatccgttatcccgttaacctgttacgcacgtacaaccgtcgccgcaaaaccgaaaaccgaactggatagtaactgggaaccaataacggatgaacgatttatcgcatgggaataccccgactggttacctaatgcttcgttcgtagaaacgactattgtccctgcgccatacctcgccggacttggtggggactttgatggtgatacggtctcggttaacgttctttattccatggaagctattgacgaaattaccaactcgcacaagaagcgagctttctgggtaagtggtaaaaataaattcaacatcgatattggttacgatacggttgcgttcctattacgcaacttaacgggacctcgtggagcctaa

SEQ ID NO: 844 - DNA, 4347 bp, Goslarvirus sp.
  source 1..4347: mol_type = genomic DNA
atggcaaaacttaaataccttgattactaccgacagtttggcgtcagacgataccaagagctattgtcaccgagattacgtttagtgcagctattgcagctgccacgttatgctgtctatcattacaccgcaacggatccttcattgataggtcctccagaaaacgaatacatgttgagtaaagaaagtgctcaactatggatttcgtttgctgatgatctcgcaaccaaacagggtgcacctcgacgtgatcagcgattccagctcccacgagcgaaattggattatcgtgcgtcacatcgtcgttttcgtttggttaccgatctaagtacggtggagaaaaacatcaacgctcagatcgttgctaactacgcacatcttaaccacatgtacatctatcgtccaacgctcacccgttggtatgatgaatggttcaacgtacgtaaaacaatttggtcgaaagccaacgaaatcgcgcagcaaagcgatcgccaacactttttgttgttccgtataccgtcaacattgccgaagatttcgttgatgcgtaccacgcaacaggcaccgacccgtaacaacctcatgaatttcgccacgccggaggagctgtcgttctttgacttcttccgctggttgggaaccgatcgtgagaacagcacaatggcttcgttagacagagccacgctggataagcttaacgttgtatttacagacggtgtgtacttctttacgctgaatctcggcctgttggaagaatggcgtaccgggcttgtaaaggaaggggaagaactcgataaaacgacactcgaaaccttccagcgtcgttggatgatggcggtaacacgtctatggtcgcagagcgcgaatgaagaagaacagaaacaagaagaggaacaggttcttcgtcaagagcaagatattcttgcggacagcccggatgcagagtacgatgatcgcgacgtcgtgcttcctaacggtgaggatctggccactgttcttgatcccgatgagttagaagcggagttggttggtgggtcggatgaagacgatgacgctgatgcgtggaacgccattgtagaacgctcgttcgaagatgtccgtgaagtacccggggtagaagtacaaccagatttccaacccgatgaagatcaggacattaccgacgatctcttcgaagtcgttaccgacgataccgaagaagaaaaggttgatgtctttgacgcggcaacgttaccaaaaacgcacggtgaatatattcagtcgttatcggatgcggtgttggtacgcgcgagcgatctggctgatgcgggtcagttaagcggcgtccaatataaagcagcgatgcgtaatgctgacgccatccatgaaatcgaagcacccgacggttctggattaacacttgctgagtatgttgaagttaaaccaaaagccgcgaaattagcgccagcaaaggttatgccggaagcggatgttatcgtcgataagagcctatgtaaatcgacgcttgcggtgtgggataaacattacgttgaacacgtgatgcaaaaggacatcgcagccgctgttgttgccgtacaacaggcaggttaccctgtcacgggatataaagttgaagatgttgttgacgtgatgggggattatcaagtcatcacgattaaactggcccctgtaggcggtgtcccaaccacgttcccggtgatgttgccgaaggttcgtaaggacggcatttatgtcgttaacggcatcaaataccggatgcgtaaacaacgtgttgataaacctattagaaaggtatcatcatccgaagttgcgttgagtaccgcctacggtaaggtgtttgttaaacgttcagagcgtgtcgttaataacgccggtcgttggttaacacgccaacttacagcgatgtattacgataagtcctcacccttaaccacgttaaaacgtggtaacgtctttgatccggccgtcaaagtcccgtattacttcgctgtgcttgcacgcaactatacccaaatccaatttgctgattgggatatacgtctcgatataaaaacgctaccggagttcatcggggaagatcggttcaacgaacagttagccgaagggctcctgacgtttgcgcgtaacacgctgggtgaattcttagcaatcgataaacgcaatcagctctatatctgtcagtcaggacaaacaccaacacctgtagggacgttccctgatttcttcggtatcaatgcggctaagatgccgatcgaagccgccgatcttgaattcatgggtgtacgtattccggttggtgtcgttctaagttatctgggtggacttaccccgttattagaacatcttaaagcgaactatcgtacggtacctcgcggttctcgtatgggattagcacccgatgaattcgcggtgagctttgatgacgaaagtttgatcttcagtaaagacgatcgcatgacgacgttgttgctgggtgggtttaacgaataccgtaactacatcggttacgctcgcggtgctttcgacaatcgagatatctattttaacgttgttgatggtgctggacttaaggttcgccatttacgcgaacttgaactcatggagcgtcttttcgttgatccggtaagccgtacgttgctacagaacatgggagaacctaccgatttcgccatgttgttactgcgtgctgttgaactgcttctggatgactgggcacctaacaccaacgatgcgaactaccaacgttttaaaacgtacgataagttcgctgaattggtgtataaggatctggttggcgctattcgtcagaatgagaacagcagtcaaggaaatcgccagaaaatctcaatcagtccggtaagcgtctggaaccaaattctcgacgacagcgcgtccatcgtgatcgatgaaaccaacccgatgctggatatcaagcagggtgaagaagcaacgatgaccggtatcgggggtcgttcaaagacatcgcttcgacgcgcacgtgatcgtgaatacgacaagtccgatgttggtattgtgtcagagggtacgaaagatagtggggatgtgggtatctcagcttaccttgcacctaatgctaatatcgtgtcggtgtatggtgaaacacgaccattcgatgaaaagacagacggtatctcatcggtaatgagtacgtcggcgttagctgttccagccgtagaccgtgatgatggaaaacgtctggtcttcgtcgggatccaacacaaccgcatgattgccgctgagggttacgatgtacaaccgtggcgcaccggcggtgagaccgttatcgcgcatcgtgttggtaagctcttcgcagcagctgcccaaggcgatggtgttgttaagaaggtcaccaaaactgcgcttacgatacaatacgacgatccagagttaggagaagaggttttccaactcggcacgataatcgggaaaggaccaggtaagtattatcctcacgatctcattaccgattataaagtcggggatcgcgttaaggatcaggatgtggtggtcttccatcgtctttattttaaacgcgattggtggaacccaggtcaggttgtttggcgcgcaggtgttctgtctcttgtcggtattctggatattccagagactcacgaggacagttcgtatatcttcgacaatcttgccgatcgtctcgtaacaccatcgattaagagccgtacgctcatcgttgacgcccatctcaacattcgtggtctcgtgaaaatcggcgatcatgttgaaccacgaacgatccttgcaacactggaagaaccgattgcgaccgatctgaatgatgagagtcaggaagccgttgaagcattacgtcgtatgagtcagtataacccacgtgctgacgttcatggtgaagttgtacagatcgatgtgctgtaccgcgctcagattgaggatatgagtgaaaccatggcggcgctcgtcggtgatgcagataaagcgcgagctaaacgcgttaaggaactgaaactcaacgaagcaactacggggcgtatcaataacagtaacgtgagaatagacggtaatccgttaggcgagaaccagatcgcaatccgtattttcatgcgttacgaccttggtgcggggatgggcgataaaggtaccttcgcagctcaagcgaaatccgttgtctcttccgtgggtcatggtgtgaacaaaaccgaagacgggcacacccttgatgctatcttcagtggcaccagtatcgctaaccgtatcatcggttcaccggaagtggttgggactgtgaatcttggtctcctctacgcaacggaacgagctgttgatatttattttaacgacgccaaataa

SEQ ID NO: 845 - DNA, 234 bp, Goslarvirus sp.
  source 1..234: mol_type = genomic DNA
atgaaccaagaacaacttaacacggctcgggcagcgagctttgttgcgctgacgaacgcggtaacgttggttgctgaggtcgtacgtcaaaccgttggtaatgatgccgccgatcctgacgtgaacaaaaaggttatgccgttgggattggaagatgcggttgctgcgcgcttaaacagccgtctggaaaccaaagaacccgtaggtagtaatgcgttggagggagcgcagtaa

SEQ ID NO: 846 - DNA, 1524 bp, Goslarvirus sp.
  source 1..1524: mol_type = genomic DNA
atgatcaccaataaaaccgtttatgctgttgagcctattgtcgaagggtttatcaaacgtaaccaaatcgtcgcagccattccgggcacgccgttagccgcggtttgtgaaaccatgcactggaaccagccgccggaagacgcggatgcgttggtgcagcttagtgctgaacgtatggttgttgctgaaacacttgatgaaaccgaagatggcgttgtagcacctgccagcgaacgcgaggtttatatccacgatgaagttttacagaccgcagttcaagacgtggtggaaaaagtggtgtatgccaaagagttggcgcgtaataccatcctgccgaaatgccgtgcgctgtacccggaactggaaaaacgcatcgattcgatcatcctggcaccgaaactgatcccgacagtaagtctgagttactatcctgagttttataactccgaagagtaccaggccttagttagcgattatgacctcaatggcttgatttcgattaataacgatttcactccaaccggaaagcttgcgtttatcaccggtgataagctgcgtacgttgctgtataccggtaatgaaaacctggatcgttttgtacagcaagcaacggaagggatgagcgatcaggcgctggaagacatctacaactatttcttccgtggttccgctccttcttcgaacaacaccgcttatctgattatatatccggatagcgataacgttgcattccacggttcccgcgctgcggcaactcctgcattcctctgctatatgtgggccgttaacctgctggaagatatccaggacggcaacgacatgatgcttgaaaactaccgcgctaaaatgcaacaagctcgcgctgcggcgatcaacgggatggcccgcgtcggtcgtgatcgtatcctgcgtatggagcgtggtgagctgattctttctgcaccgtcggcttctcagattcaacgtgctgaagatgcgtcaacgatgacgattttcgttaacgcagatgtctacatgggttatctgcaagaaggtggttcgccggaagcactgaccgcagctgtcctgttagaacgtgaactcatcagtaaagatgagctgttggctaacggtgcaggcttcatgcagcattaccgtaactacatcaacatgaaagccagtcagcaggccgcaaaccgcttacgtgcatacgcgttggcattgcagggcgtatttgctgacctgattacagtggacctcgatgaagatacccgtaagaaggttatggaaatcgtacgtggtgaagttgctacccttaccgataccgacgtagctaacttccagcagtatttccgtacgctgtacgtgaaaaccatgcatcacgaagacgctcaaggcgttaaccgtctcatcgatgagatcgatttgattatgcgtgaacgtcctgaactcacggtgttcgaagcagcgaccatcgcaacgatgcatctgaccaccgattacgtggcccagcagctttacgttatccagattagcgaggtgtaa

SEQ ID NO: 847 - DNA, 711 bp, Goslarvirus sp.
  source 1..711: mol_type = genomic DNA
atggcgcttgtccgcaacggtgctgcggtgcttgcggactgggacatacaagaagataaatctgttgttactcgtggcgggtgttcgattctgacacccgtccgttacgagggattgggtttatctatcatcgggagtgagaaccgggtttgtgcgtgctgcccgattattcttcccgatggtcagtatggtgtcagccacgcattgacccagctccatatcgacccgtctgacatccgtgaaattaccatggatggccagccgttttatgagtttgtgtttcttcccggtgacacggtgttggtgtcaaccgatgtcgtgatgcgaaactctttcccatggctgatgtataacgagatctatacgctcggtaaagtgccatggtggtacactgagaaagaaaaatatcagctgctctacacgtcagcgaaattggcaggcgttaaactgaatgcggatagcagcatctattctgttctggcttctatcaccacacgtgaccccaacgatcgtcgtcgagcatggcgtttgctttcggatgaggaacgcagcacgttaaaagccatcgatatcggattacgaaacattatcgatagtggtacaaacaccatcaccaacttaatgggtggttacgtgaataacgcaatcgatagtagtttggtttatcctgcggatacgatcagcgaaacagaagcgattctgagggggtga

SEQ ID NO: 848 - DNA, 732 bp, Goslarvirus sp.
  source 1..732: mol_type = genomic DNA
atgttatcgtctatcgagactattgtcccaagagcgattatggaacgttgtgcgtgggtgccgagcaaaacgcttcctttcggtttattgcatattagcaccgataccgaactgaaaacgatgatgccacgtatccctcaacgtaccttgcgtatggaagacgggtcgtttccaaggatctgtgtgtccagcagtttgatgggttgtatatacggttacagtaccgcaatcaagcagtatttttctggcggtcacttagcccattggttaggcgggtacgttatttatcgtgttccgtttgatatcgccttacgtccacatcgtacgttattatccgatgttgatattagcgatgagcactggttatttcacgatccgcgctatccaaacgggtatcaaaccgagcgtatcggagaatgttttatcgcggctgttcccaaagggaagattacagatagcgatgggaaggaaaactccgttacgacagaatgtccggtgttttatatccatgcggaggttgataacgttccgctatggttgcgtcaaggcgagtttctggtggtaaagaaaggttattaccggatgcaaattaaccattacgatcatcgcttaggtgtgatggatttctctaatgtgtctgtttcacggataacgttagagaaatacctagctgccaaagacgacgcgttggtactgttggggcatcagtgcgccggatcgtatgaatggtga

SEQ ID NO: 849 - DNA, 810 bp, Goslarvirus sp.
  source 1..810: mol_type = genomic DNA
atgatgcaaccaccaattagtaatcttgtttgcaccagttatcttggtgtgaataagaaaggtattatccgtcctaatgctgacggtgcctacacctgtgttatcggcggatttaactgttttaacaataccgaagaatattacgaacttgagcgttcgaaaccgctgtttctggaaaacagcttactgcaaacaaacgcacgcaatcgttcgttgaaaggtgaatacggtcaccctaaaccagagatcggtcaggatgcaaccagctttttgcagcgagcgttacgaatcgaagaaacgaaggtaagccattgcttttctaagatttggttagaagaagcgggacgcgatcgtcgtggtcgtcctgtcgtgatggtgatgggggatgttattccttgcgggccgtacggtgatccattacgtaaagattttgaaacgccgttggtgaacgtgtgtttttcggttcgcgcgttaaccgatcctcagatctggcaacgtgagcgccgtcgtgttatgacccgtgtcatgacttacgattacgttaacttgcctgggatcgagtttgcaaccaaatatgactctccgacgatggaagggttccagaaagacgtagaacaggaagccaaagcaatcatggatgcgtatgatctcccgattacagcaccaatggtcgatgagcttgttgttcgttccggtggccaacacgcgctggctatgttgtctggcgacagtccggttgtcttcctggatcagttacgtaaccacctacgttgtgatgtcgttaaagcgggcagctttaatcattggtaa

SEQ ID NO: 850 - DNA, 111 bp, Goslarvirus sp.
  source 1..111: mol_type = genomic DNA
ttgtgtacggaagtaatcgttaccgtatttaggtggtttagctcaacttacatcctttttgttatctttgatgcctgctaccagggccgttatggacaccgcgtcacataa

SEQ ID NO: 851 - DNA, 801 bp, Goslarvirus sp.
  source 1..801: mol_type = genomic DNA
atgcaagaagaacgcgatatgcctaaatcaccagatgttattatgcaagcctctgagaaagccaccaagcttgctgtgagtgtgtatggcccatgccatcaagaactgtcttatgtcgatctacttcatgcggctgagcgcgcattagcgtggacactgtatattcacaaacatgcttaccaggcttcttttaatgcggttaaagaagctgtttcaccgatgctgattgaccttgcagggcgtaaggcaatcgggacaatatccaccgaagaagaacgttcggcccttcatgaaatcctgggtgtggctgacgcatacggtatttcacttgcggttatggaaccgcagcagattactttcgatgtattgaacgatcgtgcatctatcgtaagacagcaaattggccgtgcgatggaacatccgtcactacctgctgttttgacgtattttaacaccgtatattggggttatacattacacccagaaatcgcctcaccaggttcggttattccgtgcgtcgatctgctgattcgtctgttgtgtaatacaacaatggaaccactgcgttcaccgcatgttctgctcacggatgaagaattggatgagcttcgcgctatctctccgaccgcacgcagcatggtgcagttataccgctacttacagaaagcggacgaacaagacttcatgtgggaagatccgtctgaaggtgacagtgatggggaagaagatatcaaacagacccgcaattacaaggtaattcgtttcgcgcggaacgttgcagtattattggaaaaaagttga

SEQ ID NO: 852 - DNA, 480 bp, Goslarvirus sp.
  source 1..480: mol_type = genomic DNA
atgtctgaagctgtagaaaccaccgtagcgactgaaaccacttctaacgtacgtccggaagttcaggctctttctgataaaatcgccgctggtattaaactggacgaatctggtagccagaagttaggcagtgatttcctgggtactctggtaacgccggaagaaaaagaaatcctggaaaaagcacagaaactgaccaccgatatcggtctggctcatggtctggcggtaggtcgcgttggcgcgcagttcatggcggataacaagcaggttgacgttgtttctgtaaccctgccgctaggcaaagacgttgtgtccgcaacggttcaacgtagcgctgaagttggtttcggctctaacgagaagaaacaggtttacggacgcctgaccaccgcgtataagaaatctttcccaacaactcaggttaagcatattcgcgacaacatcagtgcgtatgcagctgagctgctgaaagactga

SEQ ID NO: 853 - DNA, 453 bp, Goslarvirus sp.
  source 1..453: mol_type = genomic DNA
atgtcaaggttttattttttatcctttggggttagcgctgtgtttttatacacccttcaattagccaaatatcgttggctttcagacacacgagcgtttctactggacacgacggtgaaaacaggtaacccactcttcgcaccttcatgggaacttgttacaggaatcaaatcaaaaacgttaaccgaggatgaatataccataggctactacgcgcttatgcgcaaaagctttgttgatcatacaccggaatggttggctttattctcccatccggttgtggtgttagggtgttattgtcctgcaggaaatttctgtcaccgtcatttgcttaccgatatccttgaaaagatcgccattcaagaacgatttcattttgttaggggaggtgagataaccagtaaggaacagctcgattcattaatcgagttttggaataaggagtttgagtaa

SEQ ID NO: 854 - DNA, 540 bp, Goslarvirus sp.
  source 1..540: mol_type = genomic DNA
atgagtgtttttcttatcggtgcagcaaaacctaacaacaatgaactattgggtattgcggaagagttggatgaacatggcatgatcgtttactctatcgacaaagcgctcgaaagactggaacggtggcgtaatctcgttacggatacactggatcgacgtagcatggtctacggatatatgttagaacaatacgatgtcgccgatagagcatccaccacgcgttctggcgcattgtttaagacgacaataggaagttaccagttcggtggattagaattgctggaagcgttatataagctctcagagggcattcatcacgatgatctcgatgaccttcgggaatacgtgaatgaaagactcccattcgtgattccagacgcgcaactgatgttattaacacaacgtgaggaggaacatctttacaaacttgcttgtacaacgatgcgtcatattcgtcgttatcgtaatcctgaattcattgaatctcaagaatatcctgatgtcattttcattcgtgaagccacgaacaaacagtaa

SEQ ID NO: 855 - DNA, 891 bp, Goslarvirus sp.
  source 1..891: mol_type = genomic DNA
atgcgtcctgataataccctactcggtgaacagggtgttggtgctcttagcaacgcggctatggtcgatattcgtgcaggtgcccaaaacgggtacatcagcaatatcggtacgtacgttgctaacgccaactacattccgaaccaaatgttctgtctcctgctggaggcaccacgtggtttcaactatctacctaacccggatgtacagattggttatctgaaggcgttggtagaagaagttgcgcattcgattaccggtctgcaacgcggattggaagttgaattcgttagcgtcccggtttctggttccggtgaaatccaggaagaagtctctgacgttaaacgtcctcgctctaacccgactttcgggatctatgagaaagaaggtcgttccgttagttacttcctggaacaatggatcacgtatctgttgatggatccggatgccaaatacccgatgttgtcgtctatcgtatccactggtggtccaaccgacctgctggcggattatcgtagcgcaacaatgctgttcgttgagccagaccgccaacacaaaaaagtggttaacgcctggctgtgcacgaacatgatgcctcacggtaccggtgactggacatcacgtcgtaacaagaacgatgcgccaaacgtggtagaattgagcattcagttcacagcgttaacacagaccaactacggcgtgcgtgcttttgcacaacgtctgctggataagatgaacctgctcaaagtgaacccggatttccgtccggcttatctgagcgacatcgatccggctgtggcagcgcagaaggttggctacaccttcgactttgataacaacgatacctttgaggtaccgaatacttatcaaaacgtaacacctcgcgtgtaa

SEQ ID NO: 856 - DNA, 2073 bp, Goslarvirus sp.
  source 1..2073: mol_type = genomic DNA
atgaggcttaagaatagcacgcctcgcgcgatttttacgggctttaaagagggtcttaccacggatccggttacagccccagagatcacgcccattcacctcccgtatgttttcattcagggtggtcgtggtaaagaggacaccttgctgttaacaggggacgccctgtctacagtctacggtgaagatatgctgaactaccgcagtaagtacgcttctccagcaacactgattgctcgccaggcggcttctacaggtagcgcgatcttcacaaaacgtttggttgcgccggatgcaacggcagcacgcatccgtatcggtgttgaagtggtcgccgataaactggtcgtttaccagcgtaacgctgacgggtcctttatgaaggacaccgacggcaacaaaatccctgacggcgataaaaccgttgacggggtgaaaatgcgttggattgttaaccacgacaaagatgccgtagcgcctaacgccttcggtaaagatgaagtggttatcggacaaatgaccgcagctgatggtacccagagcaactactatcctattctggatggaatggtgagctggcgtggtgctgaaggggacaacatcggcttacgtctggaagcaccgaccgcgctgagcagcaaccctacccgtaccgatatcatcgaacgtatcggtgctttcctgtaccgcattcagttcgtggaacgtaagtcttcacgaactgcgccgacggtcattcgtacgatcagcggtatggaacaagaaaccttcgcgttgcaggaaggtgttatccagcctgatgacgaaaccgatctgtccttcggtaaagtggtcgttgatgcctacgagtataatgaaacgggtaacaccccgatctttgctccgatggatcagatgcatctttatcagaagaacatcgatgaagtcgtcaagaagctgtacgaatctgaaagcaaagttaacaaagatctgttaaccgacgttgaattcgtcgaaggtcagatgaacatcttcaccggtgtcgattacaacggcatcccgtatcaaaccatcgaagttctcgatgcagatcagggcggcgtcatctttgatggtaccagcaccttctacgcaattgatggtagcgacggtgacgtcgactgggataccttcgacgcgttagcgaaacagcagttcgaatcgttcggcagaatgggcgaagatctggaagacatggctttctatccgttctccatcgtgtatgatattggttacaaagtcgacacgaagaaagcgatggcaaacgtcttgtctctgcgtccggatgtcatgatcattgcgtcaacccatacctggaagggtgtggaactgaatgtcgatgaagaaagctccatgggcgcgatgctgcgtaactactatcgtctgcatccagaaagcgtgctttacaataccccagcttgccgtgctgcggtattcatgcaatacggtgaaagcatcgaagcgccaagcctgggtaaagttccgttgacgctggaagttgctaataaacttgcaacttacatgggtgcttcggatggtgttatccgcggtacccgcatcgataacaaccctggtaacgttgtcacaacgatgcgtaaaatcaacaagacgtatcgtaacgcaacggtccgcgatcgtgattgggaaaacggcttgaactatgttcagacctacaaccgtaattccaacttcttcccggcttggggcacgatctacaataacgaccgttcggtatggcgttcgttgatcaacgtgatcatcggttgcgatctgactcgcgtgtgctatcgtctctgggcagaaaccaccggtactacaggaatggatgaaaccctgttcctgaaactgatgggcgaacgcttcctggaatacaccacgggccgttacaacgaccatgtgactgttaagggacgtttctacctggataaagaagacggttacaacggcttcagctatcacggcgatatcagcctgatcggcgatccaggcatgaccgtgggtacgtttaccatcaccgggctgcgtcgtaacaccgaagcagcagaagcggcgtaa

SEQ ID NO: 857 - DNA, 948 bp, Goslarvirus sp.
  source 1..948: mol_type = genomic DNA
atgttcatctctccttacgacacaactgttggaacaaaactaaaaggcattgaccgtatccgaactgctatcgaagttgcttacgtcggcggattgttaagtgcacccggtgaagaaagtggcgtaaacactcccgttctcgaagtcatcggcaacaaaaatacgttggacgatatcccttcttttggtcatccgttggtcattaaaacagtgatggacggacagcgcgttgttatcgaccaacgcgcttacgcgcgcaccccaacagatacttcacgcccaggatcgcgtactaccgttgttaacgaacgtgaatataactttcttcaatcacgtgcgtatcttcaggtaggatgggaatccttgggcacacgtccttttgaacgtcttggccctatcccgatgcgtgtcttttgtgattggattagcggacaaatcacacaacgtttagggctggaccttcaacaacgtcgtgatgttgccatcataacagcatggtattatctttgcctgtttaaagatagccttacaaataatgaaagactaactatggtgcgcaccatccagacaacgcttcgttacgattttgcgagcatcggtatcgtaaccgaaaacctgggttatatccctaacatggcagctttcgtaacagcattaaaagaaagtaatattagtccccgtttgaacacgttaacccaagcgttgttgtttgaaatcaccgcttacagctgggttgggggttatagtaaagaagttgctgggattgctttagagcatccaccaacatttattcttttatgctctgctgctgaccacgatcgtggttaccgtgataccgtgttggctcgtctcatggcggatcagcgtcgtatggcgcgtgacgtcaatgatttccaagccaacatgaaatacctcctggaggcatgccgtggtgttgaacgcttctaa

SEQ ID NO: 858 - DNA, 2517 bp, Goslarvirus sp.
  source 1..2517: mol_type = genomic DNA
atggacaaccagcatcgtatcaagatgcgtcgtattaccggaaagaccggcgcagtaaaaaactttacggcttggcatcgtacattcaatcttcctgatgataccaatacgttccatgtgtttgttattggacgacatatgggggaggattttaatgtcggggcgggtcggttgtggtggcgagaactcagcaagttctgtgaggtgaagggatcgtattacaatatctataccgaggacggtaaagaattcccgttgacattaacgtggacgggtaatctggaaaacgaaacgatgctggtctgtgtgctcgaccaaccgaatatcgctgaccttggcgttggtgattattactggcgcacctatctcaacgccgacttcgcagaaggctatccgtcatacacgaaaccgacggggcgtgaagtgcatgtccttggggggattgtaaccagctcgacacaggttctacagtggcagcgtcagctatacgcctggcgtaaaaagattcaggaaaccggtatcggctggacgcactgcagtatcaatggtgaagcggttgaagacattccgccgacaagttttaagatcggtgatagcattcaggtcgtctatgacggtaccgttgttcatcggtacagcttccgtgtagaagatcttaaaacgtacaacagcgatctggacaaaaaagtgaagtatcttattcatccgccgaaagatgaagtggataccaagatccggtatcgtgatgacgttgatatctacgtgaaagggcctaacggaaaagggcgttattaccacaccaaccaggaaaatagtatccgcatgctcacacatcgtgattacgggattcctgttgattatgtcagctacttcgttgaacgggttgatggagcagaatcgcttcgtgatttaaccctggaagtggttgtccgtgatagcggtttgaaaacgcagttaacctttgaacataaccgcatccacgaattgtataaacttccagacgacgtcatcgtcggtgcgatgttagaacagaacgctaatatacccgagttctttgcacgcacgcttgaagccagtgattatacacgcatcatgcgtaataaggaaagcaatatcacgatcgacatggtgacctccgcttacgggtataacgcgatggcaaaactggttgcagatagtccacaacgcgttactgacgatatgggtacccctaccgctgaagtaccatggggtttacgtgcaaatgcgacgttctttgagtacgacagtgacggtctattattgggtatcacgcaacatccggcaggccgacatttttatccgcaatatgaaaccacgtcctatgttgagggtcgatcgggtgttggtgggagaacgcttgattacgtgatgggtgttgccgacgtcccaatccgtgaatgggcgagttaccgctgttatagcgtaaatcttcgtaacggacaacctgtcgcgaacacatggaaggatgttaccgacgatgcttctgtggtaacggaagagaacggggtaataaaatggtcgttggatggaagaaagcaaaccggtttagtattgttcgacacctacttcttagcgtataagaccacaatacaacatcgtaaccacaccgtatggttggatgttacgacgggtattgatgttgaatatccgctgcctttcgaacctggtcaaatcgaagtatggttaggtgacgagcgagcaaccaaaagctacagcttggtacgcgatatcgattatatcgtaaaatggccaacgatcatgatcaacgcgaaacggtatttcagtgaagggaacacgcacacggttaccgtgagatgtactggttttccacgtacggacttaaccggtgaaaccgtttacgataccggttggacgatgcataatcagctttcttacgacgacgtgtttaatgttcgtgacgaccatgttgttcgtattgtggttggtggacgtatttacgatcgtagcgaagtggttaccgcagaggacacgcaataccctgccgacatcaaagtcaacgatggggtgccttatgcgatttaccatgttattgcccctatccgtggtctcgtgaacacagacacgtattatctacgcgacaaaagtcttgaaaccgataaacgcgttgaagactatatgtccttgtatttccctcgtgtgaagtacgatacgccggtaacgattgaaaacaaataccagcttatcagcccaacgttgatggcggtaacgtacgatcttatcaatggtgttatcgatcccgatcctgatatgcaggacgttaaactgatggatttcatggagccgtataaatggttctatgactacgatcctgcgttacgtaattacgattggcggatggtctctattcatccacacgacagttggacgccgcttgaagttacggttaaacaactgcggttcttagaacgcgtcagtcgtgagttcttgaaagatcgcgtggacttcacgaagttttacacaatcaaaggtgagtga

SEQ ID NO: 859 - DNA, 1734 bp, Goslarvirus sp.
  source 1..1734: mol_type = genomic DNA
atgggaagagagattaccaatccggtgctttatgcacaacagcatccggataaactcgctattcaggatctcgacagacgctataccacctatgcgtataaagagatctataatggcgttgaagaagactggaaactttacgtccccaacgtggacgataaagttgaagactgggatacgaatgcggtgtaccgtgttatcgccgtagacgatcgcacaaaactaagtacccttaaacttatcggtcagctgtctgctccgttcgatggtcagggcgatgggacgacaacctttgaaggtattgacccgacgtggtcgtacgatacatggcgtgtattgattaatacgaacacgatccctgctacaatgaacatcgatcgtcgtttccatctgcatggctcggatattcgacgtatcgcagtgttccgcggttctgatatcagcgccaaaggcgaaatcatcagtgcgatgtatgacaacagcgggaataagatcagcgatttcattccgtgtcagcttatcgcttacaaagacggaacgaataaagctatctgggcacctcgtgaaggttactgcattaagcctgtcgaagattttgagcaggtgatggtagtaggttatggtgacggtccgcagccgctatccatgaaacgcatgatcgttcgtatcactgactatgtacgcaccccagaccagggtattaaatatattctggaagacggggtacgactgaaatcaacgtggctgagcagcagcgataccaaactgcttgagttaccgatcaacgtcaacctggattccgtcgaccttcaggctgaagtcacttacagtgatggttccattaaacattggccggttactggtaacaaggttgtgttggacggccttaacgtcttcacgtcccaggtcatcaacagcaaacatccgctggcgttacactactacctggacgacgatgaggacacatcctacgcgttaccaggagcggtgaaacacatcagtgtgccttataccgtcgtttctaaagaagcgaaaggggcttacagtgttaaactgttctgctatccgcaatgggtatctgatgctgtgggatacgagctggtgttctggttgtacaacgtcgaccgtgaacgttactacaacgtaaccgataaagtacaattggcgctgaacagccctgagtttaatccgaagaaatacggacaacctcaggaatttgcgtacaacatctggttagatgaagtcgatcctaccgtttacaaacgcgtacgtcatacgcagactattcgaatgacgctattgcaagcaggttcggcaacatccggtgattactggacagtaacgttcagctcgcaaacaacgccgacgacaacggatgtgtacggtcgtaacacgaaagcgttgtttacttacgatgttgctggtaacgcgtatgttgacttgacgaacaaacactcagatctgggtgaatggttgaaccaactttactacgcgacacatccgctctatcttgagaaaacggaatcgaaagcaccagaaccgacccactttgaaatcatggttggtcctaacgtgcagaaacgtttcgaaatctcgcaatggaataggaacaataacgtcccaggtggtacgggacaggataacgctaacctgtatatccgctggattaaagtacagaatggcgtcgacctacatctcggtatcacagcagtcgttattagtaaagtcgcataa

SEQ ID NO: 860 - DNA, 2232 bp, Goslarvirus sp.
  source 1..2232: mol_type = genomic DNA
atgtcgattgtcgatccgaagaaaatcatcctgtttgaggaagattgggattattttcctcaggctgttccacactgggaaacaacaaacacaagttggcgtgatttagcgatcttgtatcgtcgtgaattcggtgtccgaaactctgcgtttttcatggcgttattaaacccaagattgattggtgttgatcctcatgcaccgaatttgacgtcagaacagattcagatgatcagtgcggaatgctatcttaatccatggtacttcttccgtgaagtgatgcgtgttccggctaaagcgggtgataacaaaatttcattccgtgctaaccgcggtaacattccgatgctctggggaatatttacccgaacgaactggtatcagatacagatacgtcagacgggtaaatccatgaccatgttaggattgttctgctatctaacctatgttcgtagtcgaaacaccgaggttattcagttaacaaaagacggtgatgcccgtacgaaaacagtagaagatgtgcgtagtatacgtgatctgctgcctgcgtatctctggacgctggatagccgtgattcatcgaacaaagagaacgtaacctacacacgtttcaagaacaagttatcggtaaagattccacgttcggataagaaacaagcaacaaacatcggccgtggtctaacaaccccgctattccatagcgacgaaaccgcgtttacgaaatacatcgaaatcattgttcctgctggtatcggtgcgatgggtgcggcacgcgatgaagcattaagcaacggcgacctgacgagtatcatctatacgacaacagcaggtgaattggataaacgcgaaggcaaatgggcttatgaagttttcatgcgttcagcgccgttctctgaaagtttctttgactgccgtaatgaaaagcatctgcatcagacggtattgaacaacgtgccgtgcgagctcagcaaagcaaccgtcaggatcggggcacaatggaaccacgctcagctgggcttcagtgatgaatggttagcaaaaaccatgaacgaaacggaaggtgataaacttcagaaagaccgcgactacatgaacatctggaccaacggttcagcagaaagcccgttaaccgctgagatggttgagatgatcatggcgggacaacgtgaaatcgaccatatcgagatctcacctgaaggctactgcattaactggtatatacctcgaggtaaaatcgagacatacatgcagaacaataaggtggttgctggtttagacaccagcgatgcaataggtcgtgacgctatcggtttggtgatggtggatgtagaaacagcagaagttgttgcgacaggacgttttaataaactgagtctgctttcttttgctcgttggatggccaacttcatgatgcgttttaagaacgttacgttgattcctgaacgtaaaagcagtgcaatcatgctgttagacgcaattgaagagttcttgcggcaagcgggcatcgacgtgttcaaacgcgtatacaacacgattgtagacaggcatgctgataatccagcgatgttcgaagacctgaaattaccattgagcatgcgtgatgaaagttggtatgctcaacgtaaacggcatttaggcttcacaacggatgcgcgcaaacgtatggagttgtattccgacatcttgatggaaggtattgtagaaacccgcgggcagttacgtgacaagatgctgtgttccgagatcctcggattggttatcaaagatgggcgtgtcgatcaccaggatggaatgcacgatgacatgacgttcgcatggatgttagcgatgtggttcatcaagcgtgctaagaaacagatccattacggtatcgatccacttaaagtcatgagtcgtttaccagcatctgtaacgggtgaaatcgatccgtatgaagcgtatcttaaccaacagcaggcgaagctacgtcaacgcgttgctgaaatctatgagttgcttaagaccgaaaccaacggccttatcttggatcgattggaggcagagcttcttacgtataaaggaaaaatacgtggggaggattcagcggctgtttctattgatgcgatgatcacgaaagcaagggaggaacgagcgaatacttatcgtcaaataagccgctcttcgaatgaacggaatatttctcgtaatgcgtggatgacgatgggccaataccgcccgggcggttttttctaa

SEQ ID NO: 861 - DNA, 309 bp, Goslarvirus sp.
  source 1..309: mol_type = genomic DNA
atgggtgattcacttgatcatgacacacttgagcaattacgtattttaatcaaacttgtcaagcagctggaaaccgacgataacttaacagataacgcgcattttattttaagcgataagaacatccttgtcgaacgcattcaaaataaatgccaacgtcttctgttgtatgtagaagatcctgattgtttaagcgctagaacaaaacatctattcgatgcgggtattcgtgtttgcgctcaatcggaggatcttttctgttggcaaagaggtgtattgtttacgacaaaaggtcgcgttgaattttaa

SEQ ID NO: 862 - DNA, 132 bp, Goslarvirus sp.
  source 1..132: mol_type = genomic DNA
atgaggcctgagcatttttggtctgtcgagcactgtgagagaacgacagttaaccaggagaggacaaacgacttaaagggatggtactcctgggtgaagccctatgcttcaaataataaccaacgtcagtaa

SEQ ID NO: 863 - DNA, 1239 bp, Goslarvirus sp.
  source 1..1239: mol_type = genomic DNA
atgtcttctattttacaggtgtttaatgcgcatgcggaaggcattgacatcgacgagtattttgttaatcaggttatccgttacgcgacacgcttccgtacgcaagaccaagaacacatgcgttttttcggtggggttctgttaggtgtacagaaaatccgattcacaacaagacataacgatacatggttttccgacgtcttgatgatggatgaagaaagcttacggcgcgatttgagtaaactacccttctacaatacgcagaccaaccgtgttgcctcaaacgcctttaacctaagttgctgttggttgctttatgcgatcttccacagcaaacaaatcaaaaaagaaaaggttcgtgaagccgggatgcttgcagcaatgcaagtcctccattataaattcatttgcggtctggtagcacgacgttatccttataacgccgatccggctatcgccattaaggcgtacgatgagttaaccctcaaatcaggcatcaagcgcatgaatagctggaatgagtacatcgacgaacgctgtaacgccatcattgcgcgcaatagcacgcatttcagtcgctggtcaaccctggaaccagatagtgtcgccgaacgttttgtgcgtgatgtgaataccggaatccgtaaggttatcaaccgtatcaccgatacgtactatgcgatgtatgaagagggtaagaagataggcacgtcctctcaaactgtagaattagacgacggcctcgctgttcgcgatatcaaacgcaacgaaaccacttatcgtcaatatctgttcgaaatcgcttatgaccgaacaagtttcgttaaacgtgaactcatggtcgtcatcctcgacgtgcatcatactaccaatcttttatcccttgagcgagcgttaagctatatcagcgctaacgtagaacgaccgacaagagacggaaaacaggtctctcagatgttgcggcttgtaatggagcatgctatcgagtatatcatcttgaataaggtcgatatgcgcgatcttacgttcttattctacatgcgtaacgtgtacacgtccaaccgtaccagcaacccgaaactgttagaactgcgtaaacttggctctgaagtcattaagaaagcaaccaacgcgagaaacgacgctgaagctgcagcgacacgtaccggtgtctttctgtatatcctgcttcgtgtgtttagccgtaactattacgttcgacgtgcgatgtcacgttaa

SEQ ID NO: 864 - DNA, 552 bp, Goslarvirus sp.
  source 1..552: mol_type = genomic DNA
atgccgtccataccacataggtcagacatgaatataggattagagtatatcgaatatgcattaacgtttaaccttttcgaattgcatcgaccccttcaactggggtatttggttaacgcctcggcaaacgaggataacttccaacttcggttcacgccgccaggattacccgatacaatcgttgtcgagggtacgctagacaaacttcgtgtttatctccgtgacccagatgaccctcagcttttttatcctgggttcgcttatctggttaaaaaccacgtgtttctctttacggataccgacattgacgagtggtttactgaacagtttgctgaattcggctgtgttacggattggcgacacaaaggcatgtcgccctgctggattcccattgaacggttttggggacatcaacatcagctgggttgttacacggttgttttggaaaccgctgacttctttgggcatcgtgtattacgtaacgcgaaatacggtcgcgtcgtggacccatcaacgataattcattcaggtaaattaaggattacaagatga

SEQ ID NO: 865 - DNA, 600 bp, Goslarvirus sp.
  source 1..600: mol_type = genomic DNA
atgagctttgttccaaccttttctaacggcgttgcgagcgccacgcttgacgacaacaatgttaccgtggaaatccatcgtgggtatctttcggtgtatgataactcaacgggatcggatgcctgtatattccgttaccgtctcgatgaagatcgtttccagatgggcgcaatcttccagaagtttggtttggatttcgagacccgcgtcgtcagtgcgttacaacacaacccgctatggatgatgtcggctggttttacgcgttggctccactacggtggcgatcctcaagcgggcgtcattcacttctttctggacaacgccacctacaacaactgcatggttgtaggtatttcaattaaaccagaacagttacaccgactgctttgtgttgatgcgtatatcgatgaagacacattgcaagatgatgctgatctcctgcagatgcttatcaacggagatccgttagacttacgtcaacaagcaccaaccgaacaagtatgctacactccgacctttgcacctaaccaagtcctgcatgggcttggtgcgctttatgcgatgttgatggaggtttatgtcccatgcttcaaaaattaa

SEQ ID NO: 866 - DNA, 354 bp, Goslarvirus sp.
  source 1..354: mol_type = genomic DNA
atgcttcaaaaattaatgattcccagcgtaaatgcggtcattgacgatgagacaaaagccgttcacgaattcgttgtttcaggaaaccattactacaccgtaagctggtatccaccagacaatcatgtcttcctcaaaccgcatatcgaaatccgtcgaggagaccatgaaggattgctcttagggtatatccgactcgacggagataataccccaccccgttttgaaaatgtgaatttacgcgatccacaacaatggataaagatcattgctcaatcacgtttatacaagacgatgataaagaagcaagatgtattcgaatcgttaaaggttcatgcagaaataggctgttag

SEQ ID NO: 867 - DNA, 135 bp, Goslarvirus sp.
  source 1..135: mol_type = genomic DNA
ttgcttattcatttgagcaatactgaatgcttactctctcccttaaaaaggagagggccggtaggccagtattacttgggagaatggggaggtggggagcattatatctgtttactatctttagatagaacataa

SEQ ID NO: 868 - DNA, 1038 bp, Goslarvirus sp.
  source 1..1038: mol_type = genomic DNA
atggatcaattaccaggattagataacattacttattcagcttctcttgttcttaatcgtcacgtcatcgctgtcacgagtggtatagtgccatgggagtcgataatgcaatccccttgttcgttactattgcgtgtgcagcataccagcgttcctgtacacaagccctttgtttacccagagcgtgaagacaaatggttgaaaatggtggagggaccactgcattggacaacgctagcagatgaagaaggactaagcgaccaggagaaagacgacgtgttccttagcgtacgtaatctggctgctttcgtcgtcactagccttatggatacccatgaggaacgcgtagccgaaatcgataataagttgcgttatatactcgctaatccggatcgtgaaccatacgctaaagaagaagtcgacggtgttctgtttgaatattaccaattcgaagttagtaatagtgacttaggatcgacaatggtgcccacggcacgtttaggtcaggtatccgatttaatccgtaatgattggctttatcgtacgcatcctgttttctttgcgaaaggcgatcagccgttaattaccgcagcattcatcgcaggatacaataaagaaaccgataaaggtgagatttatctcgcggtttatcgcggtcatattcctatcagtacgggcggtaagctacaattttggggtatcgatttcactatcttggattgcgggttactgttacgcgacaaacgtgcattaacgctcctggattataacttccaggatcttaccgtaatggatctgaagcaggctattcctatcatggagtatcctaccaaaaccggcgttaagaatttcatcgccgctgcagaggaaagcctgttaggaacatggcatgttagcctgcaatacaacgggacagagtggtatcgtgataaacatgctccggaagttgatcctgcgttaaaagagcgtttattacgcgagcttgaacgattcgttgcaatggagaaaatgaacaatgacgttaacgacgaacaatga

SEQ ID NO: 869 - DNA, 825 bp, Goslarvirus sp.
  source 1..825: mol_type = genomic DNA
atgacgttaacgacgaacaatgaagacatcaaagatgcattcgtgagcgttgaacttgcggatgtgtctcttattgtccgtggctataaacccgaaccttataaacaggcgagcggtttcagacttgcccgttcagcaagccatttaatgccagatgagatggcgttgattaccggtaagatacgtttggtttttgaacccggtaatgatggaagaatacccattagtacaacgtgtgtggttttcattgatgactatccgttagtgcctgttgaattgtctacagaacatcaatggaccaccttaccgatcacccgcggctcatgccagaacttttcgtgtaagacaccaatacttcaagagatctcttcgtatagcgacggtgaaccgatacacacgtacgcaccgaagtatttcgacgacatcattttgttcttgttggatacggatgatgttgaaaaataccttcctgaacgtacgacgttcgtcagcccacgtaaactggagattgttcgtggccgaccgctgatgttggatccaaccaccgaacgtcaactcttcacgttgcgtaaggaaaccgataacgacggtcgagaagtgtgggagttccgcacagattatctgttgttaagttttatattcccgcaggatccgcacgaacccattcaggttaagccgggtaaatggggagacgatgcatcgaatgaagaacgtgtatcgatcgcgatgcagttgaagatgatcattcttagcgcgttgcctcgttacgagtgtttacgggatcgtattttcaactacgtcgatacgtcagaaagcgatagttaa

SEQ ID NO: 870 - DNA, 375 bp, Goslarvirus sp.
  source 1..375: mol_type = genomic DNA
atggataacatcagtgttattcgtgagtaccgtgccgccatttatgtcggcccaatcgtcgatgtgttagatctcgctttacgttcgccattccctgaccccgatgcgcgtcacctgatggttgaatatgttattttacaggccatctttgattgtggcctgttttattctgatcagttaggtttggcgcattacttcaagccggagataacacaactgttacaggtgttgtcgaggaaggtgcagacagatgttcgtaaatgtgttgtaggtcaattagagccgaatttctggtatcgatatgaattcgaattagaaagcgctacattggaatacaacatgctccggttggtgatgatccgacaaggagtttaa

SEQ ID NO: 871 - DNA, 300 bp, Goslarvirus sp.
  source 1..300: mol_type = genomic DNA
atgacgacgaagaagaaagtaatgccgaaggctgcgcatggtatctacgaattgtggttattggataaacacggctataaggtcttaacgaaagaagaaggacgtcatgttaaagcaggactcatggtactacaaggtgagttgttgctggataatggcacgttgtttctgaatggaaggaaaattgctgtaaaacaaggacgtcgatatgagatttgttatccgttgcgtccaggtgcgatgaagaatgcgctttacgcaagtatgcgtgctgcgatgaaacgggaagggttgttatga

SEQ ID NO: 872 - DNA, 537 bp, Goslarvirus sp.
  source 1..537: mol_type = genomic DNA
atgatgtgtgataaaccgcaagtaaagctatataaatccggctatacgacaatagaatacattgaagggattcacagaaagaaaggtgcggcgtacgtgctgcattattccaaacatcacgatacgctatttgcttttaccgtagtaaatatgcgaaatgtgagtagtaatgatatcgaacgttggttaaatatccatccgaccgacgatcgtgttcaatttatcgttacgccatgtgttgcgttttctggtaacgcctatcgttttatggatagcgaagacggtgaattatttctacgtttgtatatcaccgacatcgcgaagacaagatcgacaccgtcattgatcgttgatgagacaaagacgcaatacggtattcagttcgattgtttaccggacgatctcattttcagtaataagctatcaacctcggcctgtattattgccgctgaatttgcgaacgtgctgaaagtgtttaaacggcaaatacctccctcgaaaacaccgagggaggaagctgtcgttaatcagaagtaa

SEQ ID NO: 873 - DNA, 843 bp, Goslarvirus sp.
  source 1..843: mol_type = genomic DNA
atgggtgctattgactacagtgtagatcgtatctgtcgtacaataccggcagatatcctacagtattgctatatcgatcgttacgactggcgtaatcgctatcctcgttccgtagaagacatcattaccgattgggtaatccgtaaacgggttatcggcgacatcgatatctacgggggactacaaaccgttattccccttgatgatgcaggtgtcacaatcgaagaagtcaccattaactgttatgttttccacattccgttggaagccacacagggacgttatatcacgtccgcattatccattatttcagggagcgtgaacaactacggaataaactataacgggcaatggggcgctttcaaccaaacccaatttcaacgtcagctttgtgggtggaaccccgcaagcaacacgttacagcaagggatgaacgcgttcggtcccatgaacgttcttagtacagccaacgttgatatcatcgcccctaacaccatcatggtgaacaacgtcacgcctgtacaatttcccctgagcctacgctgtttccttgcccacgatccggaacttaccaacctcagcatggaggtttggaacgacttctacaaactctgtttatacgccacgcaaagtgacatctacaacagaaccgttatccgtctcgatagaggtgttacagcacaaggacaagaagtcggtgcattcaaggaatacatcgatcgctttgctgatgctgaaaacacatatcaggaattcctgaacgaaacgtgggctggcgttgctgcctggaacgatccacaaactaaacgtcgcgccattcgactacaaaccggttacttctga

SEQ ID NO: 874 - DNA, 981 bp, Goslarvirus sp.
  source 1..981: mol_type = genomic DNA
atgcaagagaaccaagtacatatttgggctgtcggtggttgtggtggcgaaatcggctcagcatttgaaggcgaagtcgcgaaaggattacacagcatgacgtatgtcgataccagccgcgctaacctacgcgatagcacactgggtgacgatcatatttacatctttaaagatgcagccggtcgtgagttagacggttctggtaagaagcgtgatgagaacgctgaactgatctgttcacaaatcccgggtattctgaataagcatacgccaggtaaatttaatatcgtggtctttagtctgagcggtggttcaggttctgttgcaggtcctgcgttggttgctaacctgctggaacgtggtgaacgtgtggtgtgttgcatcgttgcctcgttcgatgatgagcgtcaaacgatcaacgccgatcgcaccttcaaaggactgatggcggctgcagaagggttgaaacgtccagtgattgttagctatcacatgaatggcgaaaatgggaaatcggagcaggatgtcaacctggacgtgcgggttgttattagccagctttgtgttctgttttctggcgagaaccgtcgtcttgacagcgccgacctggaaaacttcttaaaccatccacgtgttaccggtttggaaccaacgatcaccgaactgaatacgttcatgggatacgattggacgaaagagaacgatagcccgattgctttctgtacgctttatccgaaagacgcgacaaaagtcatgggcgttagcgctatttacagctgcgatggttttgtgcctgaaagcagcccaattcgtgaagcgacgtcgtttgttttaagtaccgatcgtttagggggtattatcaaacagatcgcggacgaagcgaaacgttacatcgaacatcgtaacgcacgtcaacaagcgccgaaagttggtgacgaaactgtagcggaagcgaagaatagcggtttcttgcttttctaa

SEQ ID NO: 875 - DNA, 222 bp, Goslarvirus sp.
  source 1..222: mol_type = genomic DNA
atgccgaaccaaaaggttcaagtgaatggggatgcgctatgtcgctgtttatctgcgaacgttgcggtcatgttgatagtaccgaactcgcttacgagaatcgacaaggtgttggtcagttcctgtgtacgaaatgccaaggccgtcaatggcatggctattttccatatcagctatatgacccagcaaaacacgcacatatcgtcaaccatccttcattga

SEQ ID NO: 876 - DNA, 321 bp, Goslarvirus sp.
  source 1..321: mol_type = genomic DNA
atgggaaagtggtgggagaaaataagaaagcggtttaacgattggaatcaggaacggcaagatcgtaaggatattgaagttatgcgcggttatccggcgtataccaacacgtaccttacgctctactacaatcgctcaaagaaagaatggacatttgaatgggatgatttgttcgctaaccccagacctacacattggccgttccacgactgtgttatggttgtccctccagataccagagcaacggaggatgaaataaagcgtgcctgggacgtcttagacgaaagaggtatcggtagtattcgaagagggagaaaatga

SEQ ID NO: 877 - DNA, 99 bp, Goslarvirus sp.
  source 1..99: mol_type = genomic DNA
atgacgtcagaaactctcctgcttcgttttacgccgtatattttaactattcccagatatcgtgtgtataaacaatggggacttaggaaaagagtatga

SEQ ID NO: 878 - DNA, 978 bp, Goslarvirus sp.
  source 1..978: mol_type = genomic DNA
atgaccaagagattagccaggatcgatttgtacacattagcatcgtgggtttcattaccgcttatcgattgcctgagtttgcatcatcaacgccagctttctccgaaggaaaaattgcaattaaccgagttgttggtggatttcgatcttaatcagagaatgacctggactcgacatgatcctcgatatcgtcatgaatcgttcgcagatattctcggtccgatttggtaccaacctgaatttcgagaagacttcgatgttgtccagggtatggtaaccgaatatctgtcttatcaccacaataagctgtttggtaagaactggtcggataaccgtatttacggaatagaacgtgtgtgcgattatgcctatattgttgatcttggccgcgttcctaaacgtcaaataaaaccaacaccgttaaaagcatttgagttccaagaaacagagtattgcgtcgatcgtaaatcagcaaccgaacacgttgtccgcgtacgtaatagtaatcctcgagtgatggcgatgccgtcaattaacattacgatcaatatctgcccgtctggcgcgattgttgaacgtccccaggagctaacagatgaacaatttgaatggcttgggcaattggaagaacttcgattggctcacgcaaaacgaaaagcggaacagctcgccaatgaacccgtttatattaaacaaggccttgcccttaaggagcgatttaaacaacgtcgctccgtcttcggtccggtgcaacccgtactatatgagtttggggttcccgagtaccggatggatgctgagtcggtggcaaccgctttcctggataacggtgaaatacatcgacaaggtgcacgttcttcgggtccttttagaccggttcgagtccagcgtccacgcagacatcggcatactaagtcgagaacaggaaatgatgacgtgtcacgagacatggacagatctcattaccgaacttattga

SEQ ID NO: 879 - DNA, 651 bp, Goslarvirus sp.
  source 1..651: mol_type = genomic DNA
atgaagacgatccgtcaatggaaagacatgttgatgcttaccatgcggctgcgtcagaacttacgaatctcaccatggcgctggagcctgtcttcggtagtgagtttattcacgtatgggaacacatgttggaagggccttacaattgggcgttggagagttacaatgcggccacctttgttgcgatctttagagcaatttcagagagacgattctaagccgtcggttattccgcgcccaagtcaggtttcgatacatattcgcacaccacagacagggcgtcggtacatcatcccgttattaaactacagcgaatatctgtttacgatgctcgatgagcgattaccttatttctcaccgaacggaaattatgatattcacacgttgctttacgacacgattgaactgtatctgtacaaacggaatatctctggccgtgatgtcgacatgcaacttgagttcgttttggatgaagttttcatgcatgaagactacggccacgatgagaagttcgattttcgttgtcgtttatcggtgatgcgaagcgaagttaaccaaatccttcgtacgtggattccacgtgtagaagattggtggcatttcaattttacgttagatacgagtatgacgttatggttggtggtggaataa

SEQ ID NO: 880 - DNA, 513 bp, Goslarvirus sp.
  source 1..513: mol_type = genomic DNA
atggttggtggtggaataatgcaatcaaagccgtcggcatttgtgcgttatcggcagaaacctaattttcttaacgggaaagatgacggcgtgcggatatcggtgtgcttggaaaccgtgctggcgatgttgtatcagcatatggacaagtatgctttcttcgaccgcattaacgtatcggcttacgacgtgcttcagtatacgacgtacgagtattggtcgttacgtatgcagcgaccatttcaatcgtggtatccgccggtatatgaaatgataagcgaagaactgtgtcaggaactggttagcgtagatcatgacggtgagtattatgaagccatttatagttatgttgacgcgatccaggaaaccgttaacctgatattcccgtgctttgactactcgatgacacagatgttaacggccagtgggttattaccgaagaccggcgagaacaacctcgagctagaaggaattcatggatatgttgcctttttcaacattgaatgtggttga

SEQ ID NO: 881 - DNA, 483 bp, Goslarvirus sp.
  source 1..483: mol_type = genomic DNA
atgttgcctttttcaacattgaatgtggttgatcgcggaacagatacctatcgtctgacggttactatccctgactggttacaagcagagctgagcaccatgaatgacccagaagatccgttgcgcataacaacgttgttggtattagcgttacggtatcttaatcgtcccgtcttgtcacgcgaggcgttcgagaatgcatatatcctcggatacgttaaacgtgaagatatggtgttgtttacgaagatgcagctctgtttcttaaatcagttatgtctgttcaatgtcggacgtacgactaacgcacatcgttacggatgggaggttgtacaaatctatcctaccgttatggtagtatccagttttcgtcgcgcattgtgggacgatccagaaaagactgtggcgtcgttaatacatacgccgaacaagagaaacacaggatggaaaaatacgccactgagcgccgtcgccacgttataa

SEQ ID NO: 882 - DNA, 423 bp, Goslarvirus sp.
  source 1..423: mol_type = genomic DNA
atggaaaaatacgccactgagcgccgtcgccacgttataaaacgcgatgactactatcttgagcaactgctcgaacaggcggttaacgacatctatagtcaggcagaagacgattactgtttgtctgggtggggtaccgaaggaaggcagatgctgatgaggaatctactgcaagaaattgcggatgttgtcttatcggatatcgacgatgactttatcgatgaatactgcgaggagagatcgttatcacgaaaccttatcgtgcgtattatcggacgtgtttattatcgtgttgtccaggatatggaattcacaaaaacgttttatcgtggcggaacactatcatctatccgggtctggtcagcgacgactttcggatatgaatacattttaaataaaggatgctattatgccagcttctga

SEQ ID NO: 883 - DNA, 414 bp, Goslarvirus sp.
  source 1..414: mol_type = genomic DNA
atgccagcttctgatttagaaaagattggctctgttgtgagttttgatgtgtacgccccagaacttggggttaacttcaacggagtagaaattagcgctgtgtacaattatcgcacagctgtacgtaacggtcgtgatgtagacgccattcaccaacagatttattcccggctcccgtctagtgtaccgaacgatccgacgaaatacaattacgtcgaggtcattacagccgatggtgagtatgtgattctagggattccttggattaaggagagtacaatcgtcgttaccaagacgctgatctataaacccagcatcgttattgaggatgcgaccgacgtgacgaaaattaatcaaattcttaatcaggcgggttacaccaagattgttgctaacgacttgattaatcagtaa

SEQ ID NO: 884 - DNA, 153 bp, Goslarvirus sp.
  source 1..153: mol_type = genomic DNA
gtgttacaacctccctctgatctagcatcattgtacacgagagaagatcttgtttcacgaacatcatcgatatctttctgtcagttattatcctttttaaccgatctggcttcggctggatcggttcttttttatgccgtccttcttttttaa

SEQ ID NO: 885 - DNA, 2154 bp, Goslarvirus sp.
  source 1..2154: mol_type = genomic DNA
atggaaaatccgttcttttacgatgaaaacggatatggccgtacgttggatatgaccaaagaagcggtacaggattataccctgttcttaatgcgcatgcgtgggatatcacagcaggaagcgttgcagtttgtccttgatacggttcgtcctggtggaaaatacgggatggttgatcccgactgccttgtattaacacagcgcaccgaaggaaatcgagaaaaagaagtcatcaagttcagccaatacttcaatgatattaaagaaaataatttaattatcacgccggtgtgggctaactgttatccacgtgaaacacgttccagtgtgctaagcgactttgcggttgaaaacggtaagttgcgtaagaaacaaaagaaacaaatgtcgatagcgcaagcacacggacgtaaagatgaagctgagttacacgataaacgacaaaccaacaccaagttagataacaacagtttgtcaggaacccaggcgtccaagtttaaccctttttataatccaattgcgcatccaagtttaacgacaacgtgtcgctgtgcttcaggttcagccaatgcgaacaacgaacgcttccttgcgggcaatttccattattacgattgtgatatcgcaattgaaaacatcgtgagtattgtccgcaacagcgatcgtaaagccattgaacaggtaatggtaaaatacaaactacattaccctacgccggaagaggtttgggctaacgtatcgaaatgcttgcatcgatatactttcgacccagagaaagaactgactatccgggagttaattaccggtttaaccccactggaacgcgcctgctacatgtatagcaataacctgtactcgttacgtgagcttaatcctgaatttgttcgagattttcttgattcgttatgcgagctggcatccgaacctgttgaaacgatggaagaggctaaagccattattgcttccatggataacaacacggtcgcttggattacagcacaatgtacggagttcttgaatggggaagcgatttacgtagcgctagaaaaaggaaatgagcttggttatcgtcttactgcagcaacgacaaaattaatgctacagcgtattcaaagctatgctgatttgattatggcgttctggcgtaccgagaaccaaccggctggtgtttatgctttcccatcagcaatccgtgaagtgggtgtgttgtctgataccgactcgacggtgtttacctgccaggagtgggttcagtggcgatttggaaatatggagatcaatccagtttcgacgcgcttagcaaacacgcttatctatctggttacgcagattacggttcatctgatggcgatgtgttctggtaatatcggtgtggcgaaagagcatatgtacgtgatggaaatgaagaacgaatatatgttcttgattctgtcgttaacctcgatgggtaaaaactattacggttacatgaccatgcgtgaaggggttcctatcaatccaccgaagctggaattgaaaggtccggttatgcgcgatgcgtcagcaccaaaaatgatcgtcaaacgtgttgaacgcatgatgtgtggtatcatggataagctgttacgtaacgagaagatcagcattcgattggttcttgacgatattatctcgttagaaaacgaaatcgttgagtccatgaaacgtggtgatcctgatttcttaacacgtgttaaagtgaaaccgcatgttgcagtaacgaaacagtcttacgatatgtgggaagaggtgtttgctcaatcgtacggccattgccaggaaccaccctatgttggggttcgtgtgccgttggcgacgaagaacaaaacgcttcttaacgattggattgattcctgggaggataaagggttacaacaacgtttccgtgattggattgtacgtaacgataagaaaacgataagcaacttaacgataccattaccggtgatcgaagcctccgggcttcctgatatctttattcaaggtatggatattcgtcgattgatctctacgctcgtgcgttcgtattacgcgttaatggaaagttatggtattttcatctcgaataaaaacaatacattgttagcccaagacatcgcagcaagttatttaccgaagcaagaaaccgcagagtaa

SEQ ID NO: 886 - DNA, 1095 bp, Goslarvirus sp.
  source 1..1095: mol_type = genomic DNA
atgtttcgtgttttaaataacctcccgcgaacatcatcgggtgtgcaacccgtccctcagaaagactatctaatacgcgaagttcaaagaaacctacagacaatccagaaccactatcaaggttttaccttcgcggttcagagcgatcacatccttgcgttgctgctcgcacagctccctatgagatacgacatctcagtacaaacttactacgacatgattctcgatcttactccagaattgggtaatcgtgttaagttgacaacatcaagatacgcgggtaagttattcgacggtgctttctatccgggattgcacgaagctattatcgcaaccggtgaaagtcgtcttatttcacgtgacgttcttgacaactggcgtaattggtcaccggttagaatcgtgacgcacccatacgcaaatcttcgttacattcctcttcaccgaaagccggttgaagaaggacgaggttttgcggtcattatggttgatgtacctttattagcgctacagtatcgaatgtggtctttggtcatgggtcataacgtcgacggcaaatgggtggttaaagaaccggttacaagcttccttgcgagttttccgttggttaacgcattatactcacacaacgatgttgttatacgcaatcgttgtttgtgggtatctccggctaagaatccactcaaatcaccaatttacgttaacgaccttgataacgtattcagtcaagtcgttctgtccgtacagcatcatttattacgaagaagacgaagctacaccgacatgcttaaacagataccgagtttatacggggatcagtaccaagcaacccgaatgggttacaccgtcgatcttcggcaaacgcgatgggcaagggatctgggttgtctgtcattatggcaacaactcgtcacgttgcaaaacgtatctgaaagcgtcgggttcagcagtcaaatcgataatgacctgtaccgtgctgccgaccggagtctaaaagaaggtaactgggagtcctctccgttacctggcgatttaagacgtgaagttatcgcacaggttgccgacctcttaaaaattcttcccgctggtgcataa

SEQ ID NO: 887 - DNA, 126 bp, Goslarvirus sp.
  source 1..126: mol_type = genomic DNA
atgatgttcgcgggaggttatttaaaacacgaaacatacgaactccgtaagaagatggtaaacggatatgacattactctcaataagagaagtaaaagtttacagacatatcctgattatatgtag

SEQ ID NO: 888 - DNA, 96 bp, Goslarvirus sp.
  source 1..96: mol_type = genomic DNA
atgttgcttctcggcagcgttcgcctaggggtttatatcgttcaatgtggttacaccaatattgaaaaaaatttcagggttatattacctaggtga

SEQ ID NO: 889 - DNA, 1896 bp, Goslarvirus sp.
  source 1..1896: mol_type = genomic DNA
atgggcttagacgtacgtaataacggtaacgataatgtagaaattcgtgcagctgaaacccgcaccgcacaacgtgctgatgaggcgctggaaaccgctgcagattttgctggccagcctaaagtaactcatacgatgcgtacgatcaaccgtacactgagccgtcgtattagccgtaatactggctccgagcaggtactgaatctccgtcgtctgatggaaaaagaactggaagataaaggattcaaagacgacttcatcatggtgaccgtcgatcctaaccaatacagtgtaccgtatccgaccctggttgttatgagcggtgcaaaagttggtgaccataaccacttcttcggttatgtgcttccactggttgccggtttggctccgctgccgcgtcgtgaagaacaaggcccgcatggtaacattctggtgccgcgtacctgggttgataacctgaacggtacgttcatcaacgaagtcatggcggcaatgtatgcagctatcggtggtaagtctaatggtactgctcgtatcgctggtctggctgtggtgaccaatgaaatcaccgctgaatctgcgcatctggcaaccaccctgctgtctgctgcagataacgcaatccaaaccgcgatcgaaatccgtctcggcgataaactgggtctgccgcagttcaacctgggcatgatggcaagcgatcagccaatcagcagcgttcagtacaacaccagcggtatgcaggacagcgatattgttggtaaccctgtgcgttctgacatcactgtaactatctctaaccgcatccgtcaagcgatgagcgattacgatagtcagcagcgtctggtcgcaaccaccggttacattgacctgacctacagcccgcagaacccgaccttcaaccaaggccctgttctggttaacggttatccggtaccgccgactgtacaataccaaccgcgttacgtgatgaccagcgcttacccgctggagctggatgcgttcacgccgaacactttcgtgttgggtctgattggcaccatcgctacgctgaacagcggtatggcgtgggcacagtctttaatcagcaacgctgctcgtggtattggtccgcataacccgggtgctctggcgatggtactggatccggaagttaccgcaccgctggatctgtctactcaaaccaacgagcagatttacaagttcctgcaacaggtactgtatccgtctctgctgatttctatcgacgtaccggaagaaggcgaatacagctggctgctgcgtatgatcccggcggctgagaagatctatacgggcaaagttgaaggtgaagtccgggaaatctccgaaggttacaaagcactcttccgtgccttcgatgatactaccctgggttgcttcagcaagaaatatcagtacggcgcaccactggtctacgctaccggtaaccgtatcccgctgggtcattataaccaccaggatggtcaccgtcacgatattcgtgatatggacgatctgtacatgatgaacatcactaacccggataccgtagaagcttgggaagacagcttcgaccgtaccgatatgacgatgtctcagcgtgttgtcgctcgtcacgaaatcattgatcgtgttctgtctggtagctgggaacaaaccggctgggcaatgcgttacgacttcgatccgttagcactgcaggcgctgatcgaggccgctgctgatgctggcttcaccatccgtcctgagaacatccagcatctggcaggtaccgctgttcgtggtaacatggcagcacgtgctcgtggtctgggtaacatctccggtaacatctacgcacgtagcgatcgtccgaatgttggcgttaacaacatgggtggggcattcaacctgttctaa

SEQ ID NO: 890 - DNA, 1305 bp, Goslarvirus sp.
  source 1..1305: mol_type = genomic DNA
atggccatcatgctcgatatcgtgagtttcgatagacagctcgcagaacttcctttcacgccgattttgttgaatgattacgatacaaaagtcgtcgaagagaagaagaaattaaacagttttatcacccgtgtttactccagcgatacgttggatatcacgccacaatgtggttgtggtttctacaatcgtggtgagctgctcggcacggtgtgtccgaactgtaaaacggttgtaacctatccagcagaacaagagattcgttcgacggtttgggcgcgtgttcctgaaggaattgatgcgttcattaacccgttggtccatctcgtgctggcaagcgagttgaatatcaaaagctttgaaacgatgacgtggctcattgatgccagttaccgtccaaatgtaaaacgacccatcgaactcaagaactatctggagcagcaattcgatgtattcgggatacgtcgcggtgtaaatagttttatacagaacttcgatcgcatcatggagatcttgtataaaggaccgacgttacgcggaccgaagaacacggagaaagttgatacgctacgagaattcatccgtatccatcgtgataagttcttcagtcagtatatcagctttcctgcggccatgatgttcgttatcgagaatacgccaaccggtcgttatgcggatagcaaaatggaaggtgcgatcgatgctatcggtacgttgaatagtatctatcacccaacaacacctttgagcgccagaaagaaagaaaactggatggcgaaagtgcaattgaagctactgcaataccatgcggcgattttcgatgagttcatcggtaagaagaaaggtatcacacgtaaaaacatattaggtacattacatccattcaccacgcgtactgtaatcagttcgataacagcgaaccatcgttattatcatctgcatttcccatacgcaccatttactttaaccaataaagaacatatccaatccaagttattccatcgtggttattcaccgagagcagcacgtgcgttcgttgcggaacatgtccgtaattatcatccgatgatgagcgagctacacgatgagcttattgccgatacaccgttcgatgggattgtgtgtggttttgttcgaaacccatcacttgaccgaagcagtaaccaatgtcttgaaatcaccaaggttaaacgcgatccgcaggataacaccatcgggttaagcgtgatgatccttaagggatacaatgcttcagatgaggccctgccttctgaaaggaagagcttgaattccgtgaattgctga

SEQ ID NO: 891 - DNA, 186 bp, Goslarvirus sp.
  source 1..186: mol_type = genomic DNA
atgggagccgataaggcggaaataagtgagtggatgttgggaggcttcaacgacagtcctgaaccaggatgccaccccaacgtacaatgtttaatcagcagcctagccaccgataatcggtggaaggttcaacgatcatgtccctcgaattcgctgagggtagcgcggaacacccttcgtgggtga

SEQ ID NO: 892 - DNA, 225 bp, Goslarvirus sp.
  source 1..225: mol_type = genomic DNA
atgaacaaccatatcgtcccagacatttggactgcgaaacatttcgggcgttttcgacccgaactcggcatgatggataataacgtaccttttaaggtatctaagaaatgtgaacaccagtcaccggttatttccactattgactgttggttcaacgaattcgtggagggcgatgacgtagaaccttatcttgacgaaatagaagcaactaacaaccattgctaa

SEQ ID NO: 893 - DNA, 639 bp, Goslarvirus sp.
  source 1..639: mol_type = genomic DNA
atggcgcaaatatttacaggtggacgagacagttatcgtgcactgaggttcggagaaatgtcctccggtctcgataaaagctttatggagtacggccacaagctgatgaatagcctcggcggcgcaagcgaacacgtaaagcatttttacgctgaatcgttagcaacgttcgacgcattcaatcagataaactatgctgaactccgtaagactttgctgagacaatcggagaacatcttccatgacgatgtggttatgccatgtaacaccgtggaggatttccgagctgcaaacggcatatctcgacaactgatcatggcgtgccctgaattacgtacgaaggcacagcgtcagcagatcgaggggtatgctgaatgttacaccgatccgttcggcacgttcagtaatgaactgcacccggactacatgcgtgtaacagacggtgtgttgataaccgatcctaaaacagatgaaacgtggagtatttcctacgagtttgatgatcatgaactcgacctaccagaactgagtatcgatgataaagcaattacattaaccaactgggacatggcacgtatcctactgcaagttcctgatggcgaagatttcaccaatatcgccggtggtaaattaggttaa

SEQ ID NO: 894 - DNA, 837 bp, Goslarvirus sp.
  source 1..837: mol_type = genomic DNA
atgccgcatgcaatcttaaaattgaaaacgaggacaatcatgagtgtaaaacgtacttctccgggctaccgtcgcattgcgagcctggcaacccaagaggatattatctatcgtatcgaacacgataaattagaatttaccatgaacgatgcggctaatatctgcggtcgtttaaacattgaacgtgatagcaataacgcgatgtatgttgccgcattgtattttaatggacggctgattgaaacgagtttcagcgttgatcgctttgaggataccagtagcagagtgaaaacactgatggcgaatatgttcatccgtacgtatttacgtacacgtatttcacgttacgttggaaacggtttatcggaaacagaagagcatggtctgcgtcgcggactttataaattgcttttagaactgctgcctacgcggtatggtattacagttcctgatgtggatgatgcgtactggcgtgatacgttggactggatgctgtatcagatttccgagacgacctccgaccttcgttatacccgaagcttaaaaggaggaagctatgccgtataccgcagccttcgttataatgaacagcagcataaggcgatgatcgtcacacgtcttgtcttcaccgtgaaaagcggattaggcgatacagctaacatcgaacctttctctgagaaaagccagtatacgacccacctcatcgaacccgtcgattgtgttactgacgatcatacgctcgatcgctacgcacgacagatctggcagacgctgacgttaccgcatatggacatcggtcttcagtcgtatacgcatcgtgataggagaacacgttaa

SEQ ID NO: 895 - DNA, 465 bp, Goslarvirus sp.
  source 1..465: mol_type = genomic DNA
atgactttagcacaagaaacccaaattctgtttatcctgtctctcatcctgggcgcaggtcttatcatttatttagcagtagcgggtatgcggttacgtgaagatgataaactttatcagatgaccgccaactggttattacgtcgtatcaacaaagactacgacaacagctactgtgaattactcgacaatctgtccaaagactggactcgcgcttacgcttaccctgttcgccgtatggcgcagctgagcaagaagtggttcaaagccaatccgcgtacgacaatcaaactcaacggtatggaacaagcaaaggtaatgacttggttgcttaacttcgaacagtatcctgaaaattggaaagtggccaagattcgtacaaaccgttccctggatgaagttattcgtttagcggcagagttgcgaggccgtaatgttaacgacgttatcgcagctttggtttaa

SEQ ID NO: 896 - DNA, 126 bp, Goslarvirus sp.
  source 1..126: mol_type = genomic DNA
atgttaacgacgttatcgcagctttggtttaagtatatttgcggtctctccctaccttcgggtggggaggggctgcccattcttttttatttttgtaactttctacgaatttccaccactctatga

SEQ ID NO: 897 - DNA, 450 bp, Goslarvirus sp.
  source 1..450: mol_type = genomic DNA
atgatccattttgatggcaatagcagccagcatttttcctttgaggtcgaacgcacaaacaataccttggtcggacgtttcggtgatggtaacacaccgttgtttacctacacgtacatgctcaataatgaacaaccgatgcgaattaacgcgaccaacttcatggcggcgttatgggtgatctacggacttaaagttgctaacagtaaatcgtacgcttacaataacttttttcatgcctggtggcagcttgagtgttacaatcgcttaaagattcccgcacctaaacatccagcggagttgtccgatattgtttatttggactgtgggtatatcgatatgcatacgcgaacattttacgcaccacgcaccaatgtatccatgcccgtcgaactggagttagggcatatgcctaactacgatagattggttggaatgaattacgcttaa

SEQ ID NO: 898 - DNA, 408 bp, Goslarvirus sp.
  source 1..408: mol_type = genomic DNA
atggcatcgaatccgttaccgggactgtcgagctttttaaccgcgtcgggtaaaaagctggatgggttaatgaccaatttcgcaatatcgaattattcccagtcgtattgctatcaaggttccatcgtttcactaccgtacctcattgcaacgtcgcagtatagcgcacccaaattggaagatgcgacgtaccggatgttgtatgattatttaatgcgttattacgatcgcgtggaattgaaagtccgtgtcaagtatatcgatccgacgacggaacgtgttgatctccagattggggggattgtcacagagaaaggtatatcgtacgatctgggtggtgttctgcgatccgagcgtggtaattttatcaagtggcaggaggaagtaaatgaaggcgcgccaaactaa

SEQ ID NO: 899 - DNA, 783 bp, Goslarvirus sp.
  source 1..783: mol_type = genomic DNA
atgaaggcgcgccaaactaacagcaacgttagcgaaggaacggatttattggggtatccggctggggtagtggttgtaaatgaggaagagcgcattcgccgcgctcaggatccgtccatcccgaaaacacgaccggacatgtggcaggagctggtagacaatagcgagcttctacgaaaaggtttacaggagatgacgcgtcccaacatcctgcctgaatcgctgttcgttaaacatttcttgtatccgttcgcaggaatgttttcccaggatcctgaatacgcggagatgctgagtaatagcaccattgttcacgattggtgtaagatagcaggccaaccgcatcgtgcggttaacatcgttgctgatgggaataacaacaaggttctgtttacggtaccggctatctttatccggacgcgttcatacatcaatcgtgaccccaatacatgtttcctcgcgatggtggacaaagcacgtcgacagtataacttcaatcctgaaagcgctaaagcttacgtcgaccatcagcttgatcgctttgccccgaatgaaagcaaagaccatgttgttgctgattacgtgcaatggcttcggatttttgaccattataacgtacctctttatgacgttcgtgatggttcacgtcgtacggtaaaagagtgtgggttattaaacggattgaatctagccagaacctcttcaacaactgcgtcggtgggtagtagaaacatgccgtctacgacggggactattagcagcagcaacttagaggaattctga

SEQ ID NO: 900 - DNA, 1143 bp, Goslarvirus sp.
  source 1..1143: mol_type = genomic DNA
atgcgagacttcagtcgaaataaaacgcctggggtattacgtggaatcaacttgtcggatattcactttatccatcgtcaaacaccgacagtaaacctgattagccagctgcgttattacattacaaaagaagatcctgcgctgcttgatgtgattacgttcagtggtgatgtcttcgatcgtatcacgacgtttgtgacgagtgacgtggttgctgttcgtgcctggggtacctggttgttacggtatgcaagaaaacacgatattacgttgatctttcttgagggtaccaacttacacgaccagaagcaaagtcagtggttcgttgaacagaacgaggtcatggagataggagcgaaagttcgttattacgatgacctctgcatggttgatgaagactttggtttaaaagtactttatcttccagataactacagccacgacccggatgtgacgttgtcagccgtgaaccgacttattgatgagaagggatcgccgggcttcattctgatgcacggtgcgtttgaatatcagcttccaccagaagcgttaaaagcgacatgtgttcatagcagcgatgcgtataacgcaatggtggagaagacccagggatggatcgtgagcggacatattcacttacaatcccagaaaggacgtatcatggttggcggttcgttcggtcgcttggcgcacggtgaagaaggtccaaaagggtatctccgttatatgttaacggaaacgtttaacgaccagtgggaatttgttgaaaacaagaaagcagatgtctacaagacgataaaactgcatggtcttgttggagatgaaattgtccgtgtgttggaacgggaattggctccattgaagaagggtgatcatatccgaatacgctgcgataaggaagacgatgcggcgaaaacgtttcgttctatcccttctttgtatccaggcttcgtttggtcaattaaaacggacgccaagaacaaccagtcgctattaaagaacagttttgtcaataacgttatcgagaaaggtggagacttgacaaaggacaacgttaagcgtttgttggtcgaacgcattcgtaataaatacccgaacgttgatgccttaaaggtttctgcttggcttgatacgttgccatga

SEQ ID NO: 901 - DNA, 798 bp, Goslarvirus sp.
  source 1..798: mol_type = genomic DNA
atgagcaatatgtacgcccgcacgttaggtgattatcctttatcggtagggacgtcagcaacactatcagcagtacagcaacagccagaaacaccgatggattggttgttcaacctgcgtactttagcacgcaatttcgttgaaagctttgaagacgttgaacaacataaattaccgttatcgatgataacaggggattttcaaaacgagttactgcagctaaggcagttggtgaatgaactcattccccatattcgtttgcggatatatgcgccaacctatgcgtcaataaagcgtgtttatccgcacgctatacataaggagccacacaccgaaaaacaaaaaggactcgctacactttatcgtgggttgatggcgtctgtagatcgactccctaatatcgaatcgatggattgtaaattacccacgataaccaagacatcgtatatcaccacgcactatgtttctgacttgttggcaagaaccggttttggtgaacttattttggtggagagccataccggaaccttgaaacgaaaacatcagtggtcgaccaaacttactggtggggatcgtccagaggttgcgaaccttccatttacaaagatgacattgggaacgttcggtgaccaagccgtacagttcaatagcgggccggtgaaaataaaaaggatgctgttagatcttgcgaaacagagtcagtggaatccattaacaacggaagaccgtacacgctttggtgtcaaccagttacgtgaccccttcgcaaaacgttttctgttggacatgttccgctga

SEQ ID NO: 902 - DNA, 792 bp, Goslarvirus sp.
  source 1..792: mol_type = genomic DNA
atgagcaattggaattcgggcagtaaaccacaaggaaacattattcctacagcgtatgacgacaacaactggaaactgtgggcggacgaaaaggttgagggcggtaattcaatcccctcattgaaaattagcgttgctaagaatcaaccgcgcatcacggtttatacaggtcgtaaagaccagcagggtcgcgccgaaagcatttgggcacgcatgagttcatacgcgttctataacctgcttgcgatcctcgagcaggttgctaagggtaagccaggccaacgttttgcgatgaagaacgaaaaggttatcgacgatcgcaataatccaggtaagaagaaacagattaccgaaagtacaacatgggttggtaagaacgatgatggttcggtatatatcgctgtaaccgcgtaccaaaaaccgaacatccaattcgtattcaagccaccgcgtttccacgctctggttgatgagtctgggcaacctttacagatcggggttgtttctccgctttgtgcgttggaatttgtacgtattcatcgcgcagtgttgccgagcatcctcgcaaccaatttcgacggtgaaagccgtagcgtaagtaatggtggcaacaatagctataaccgtaacaataacaacggcggcggtaaccgtaatgctggtaacggccagtacaacggtaactctaacgcatcaagttcggcttcagcggcccctgatacccgttgggatgcgccaagcgcaaatgacgacgatgatccgtccgtagcctttgatggcttagcgttctaa

SEQ ID NO: 903 - DNA, 3282 bp, Goslarvirus sp.
  source 1..3282: mol_type = genomic DNA
atgctgagcgataactcagccggaatccaaaattattcacgcttatattacctttgtggtagacgtcacagaagacgttttaacagggaaccgcgaaaagaggttgttatgcacatagtgcccgtcattacgacgcaaggaaaagaaaagctggatcactatctcatcaaacaccgtgatggacgtactgtggaattttcaggtcagggttacatcaagattgatggggatatggctagcaatcagatgcgggagattaacaagtatctcgcctggatagaacaaaagaacccacgtcgaattgacgacatcttcgaagggttcgttaaagcacgtgaagcgatggataactacattgctccacaacaacaaatggaggagttgagtcgcgctgttggtgaaatttacaaaccggttgtgtacgaagagattctggcattgtgtaataccccaggttgggtaaaattaccaccggacatgaaaacaacattaggtgaggatgacatacctgagaaaacctatttacgaaatgattacgttgagttaacagcgttagcgatctacgtccgtctgatggtgccgatttgggcagagtttctgattgacgcagggaaaacgtacggaacggttcgtaaagaagaagtggctatgtcgttgatgtataaaacacgcattcatgatatcgccgcttacgaccgactggaagactatatccgcgcacagacgggtgataaaaagatcacgctgtcgatgaccgtggattacatgtcaacggagaaagtgcccggctggttgcgttcacaagccatcgtccgccgtctcgccgtacgcgacttggaccaagctgtacagcctgtcgttaaagatggggtgttagtgagttgtactcatctagtaacactgatcttcagctatgtgaataacctttgtacggaacgacgtttcagcggaccgattcgcgagaaaacgccgcgagggaatgcgcaagatgaagacagtcaaggcgtgattgatgcgttgatggtgaaagataaacgttcaccacgtgtactcattctcgacattgcgtatcttacccagatggaacgtgtgttgcacgacgtcgacgaaacggcaccttacggtaaagttgaagacatgtatgcgcgtatcgcaaaacgttacgacggatacacgtacgctaaacatgatgacaccgttgagttaaaaccaatcaaccgtggatgccgagcactggcacaatggttgcttgatagccatcttccggcgagaagtctggcaccgattgaagccgtgcatcaggcaaaagcgttagcgattgcagcttgcttattagaccattggggttttcctcaactggccgcgctgaccgtaggtatccaggtcaaacgcgacgatgtttatcagattatccaccaattaaaaccacaggagatcattactgtcaataaattgtatccacacgccatgtatgaagatgaacgtacaactttaccggttgtcggtattaacatggtggccgatgcgttttgtgaatgggactgggatgtttcagcagcaggcccggaaatccttgagaaagtcccagctgaccgtaaaggattgatgctttgtccagcagatatccgtcagcagcttgtgcaattagttgttcgattaaatgaacacgtagtaaatttaagaggaaaaaataaaatgatcccgatgaatgttcgtgaaatactgatggttgaaaccgcaccgtacaacaacgtacaacgtcgtccactacgattccacgcagatagcatgcgtagcatcgaagacttcattaacacgacgcggttcggtacggcaacaacaccatcagcaatcaataagcttgcaaccggtttgttgcagcagtctgcagaacctgagggggtttcggagattgcgaatggttggggcacacgtcgtttccatttcatgatggcggtagaagaatccttggccctcgcaccaggaaccaagcgtgtccattacatttctggatacaccgaccattctgtaagcctcgatgcgtttacaacgcgcgctatcgatctgccgaacgaactggtgttcttcttcacgaacgtaatccaggtaaccgaaacaaccacaacggatatgttcggtaagcaaatcgttcgtgcaaccccgatggacgcaacgaacctgttgaccggcgcatacgaccctgttaatcgtgatgttcagttcagtactcgtgttcaggatacgctgacctatgcatcaacagcacgttgggtaggtaatggtggttttgataaccagttcatggacccagccatgcagaacgtgatgcaacagttcgatccagcctacgctgatgtggttcatcgtacatcctatccaccgcaaccggaaccggttttccgtggtgtggaagcagcaatgtgtttcgcaacagagaaaatcaaacccgctagtgccgatacgaacatcccaaccatctatctgagaaaagccttcgataatgttggcgctattcgtcagacgtacgaaagcgggtctcatccaggtagcgcagagaacgaggatatttacgtagaagccgctcaagctgttcgtgaagaaccgctggttgcacatccggtattcggtgcgattatgcgtgatgaagggttcgctttcagcggtagcctgagttgggctgacatgaaacggatgttcggtgaacatatccgtgacgtcttaacgttattcccgtatgtggaagctcgtcgtggtacatcagcaaccaccgagtttggttggatgccgaccgacagccagagctgggacgtgatcgattatccaacgctgtattgctcatcgcttgctgcaatgatgcctgctgcgatgacgtatcgcatgttggagtcgttccgtttcattgctgacaaccatggtcacccagaactcggtatcatgcctggtcagtgggcggttgcggttaccgacgctgtaccgttcattaaaggatacgattgtaaccgtgctgctgaacaaatgcgttctgacatgattaccaatatcctaccctccatgttgggtaacaacccgaatgcggttatggtgagcggcgcgattaacctgttcctggacagccagttcaagatcagcgttgacggctctgcaccgattccgtacaccatgccgaacatcaacccatctgcatacagcccgctgctcaaccgtagccagcaggaggtgtataagctgagcgttgatttgtttaacctggtggatgcggtaactaccaaaggcaacttctaa

SEQ ID NO: 904 - DNA, 1281 bp, Goslarvirus sp.
  source 1..1281: mol_type = genomic DNA
atgtcgaagcttatcgaagcttatcgcaaagcactacagagcgttaactattttgagaatgacgcccacgaattagaatatcgttttacggatggggatggtaaagttgttgcagttgccgctaccgtggaaagcatgccgttgctgatgccggtttctgaagttcgtaccggaaatcagctggctgaacgtgtgctgttccatccgctaagtgaagacgtgatgaacggcgaatcggaagtacttcagttcctgcgtcgtgcgatggttgttcgttttaacgccacgctatgctccatgctgatttggatggttgaaaccgcaatcaatcctaaagaagcaaaacgtttcggaccgaagcaaaaagagttcttcaacatccttgcggacgccagcgataaaacattaacgaccctgggtaaactggtcaccgtttggctgaaacgcgacacaccgtatacgctgtccaaaatttatcttcgtcgtaccggcgcaacctacatgggtaagaagatgacccgcgttgcggtcgttactttcccgttcatggaagaagaacatatcagcacgaaagataagaaaacgtattggtgtggtgttgagatttccaagaaagatcttaacatgctgagaaacctggttgagtacgttatcccgcacgcgggtgaggtaagtgaaacgtacaacgctgggtcaagcgatcctcatgctccgtatttcgattgtcttatccacagcttcgctaagctgatggaaccgctgaacaatctcatcaaactgtttggtgataagtacgacggtaaagagaacggctactgtgatgttacttgggttgaggattttgaaccgatcaatcaacatcgtggtcagattccgccagcgaaatacaacatgggtgtaacgctgaacagtcgtccgcagccgacggttaagccaaatccatcagcagctgcacatgaaggtatgcaaccgcgtcctgcttcaacaggcagtgtgatcgataacctgttaggtaaaaccgcacctgtccaacctaatcagtgggaaagtggtggtaaccaaccggcaggtaatagcacgtttgatgcgttgatgaaccgtgttgcggaacgtaacggtacgatgttcaataatgctgcttggccaggcatgggcatgcaacctgctggatgggggatgccgccagcaccgcagtcgccaaacggtttacgtcgtcgtgctgagatggaacgtaacaacatcctgagcgcgtggacaggacgtactgtaaatcgtttctga

SEQ ID NO: 905 - DNA, 270 bp, Goslarvirus sp.
  source 1..270: mol_type = genomic DNA
atgcatctggaatatttcaaaaatgccggactggtctctacgatagacataccacccgaacgcgcctacgaattcgatggtaacttttatggattgtgtcgtgttctgcttggcgagggcagtgaaccaatgcactggataaccatgagactcaatggttatcgtgaccctacggaatacaccgccgatgttctaaccatgaagattgtcgatacaagcgcaatcaacacattaaaacaacagtaccgcacaatccactacagcgcttaa

SEQ ID NO: 906 - DNA, 2334 bp, Goslarvirus sp.
  source 1..2334: mol_type = genomic DNA
atgtctatcgtagagaccagtccggcatttttgaaatattccagatgcatctcaacaacgttcctgaaatcaagatcgtggatgaggtcatcggggtttgtcttaagaaagtcgttcaggggcgtgttagacatgacgtacctcaattcgataataggaagtcctatgcattataaagaaaaacctctttatgaatctgtgaagcaggcaatcgctgaaggtaaaatcattcccattaaacaggagtatactggcgtagggactggacttaacgggctattgcattataactcagcacagcgcgctgcgatgtttggtggacatcttagccaagcgttggttatcaaagatgcgaaaccgtcccgactaacgacggggattgaataccagtacggacagaacacttggtcagtagagtttccagttgaatctcgcatcatagatatcatcccacgtttccaacctgggcatacagcaaacagcatcaaaacaaacacgatgcattacgtgctgtatgaaaaccaagaggatggtaaccgtcacgagctacgcttgcttgaagtgcccgagcatcacatcatgcatcagcagtacggtttccgttttcgaccaaccaacttgttccattcccttcgtcgaggccagatcgtaccgcgatattctcgtttgatggaaagtccagcgatcaatcaagaaacgcgcgagtggggttacggtcgcgattgcaaagtgtgtttcggtagcttctatcagtgtatcgaggatggtggtgttgcccgtcgtggtgtattgaagcatttcaccagtaccggcattgagaagcggacgatcacatcaggtaaatcacgatacccaatcaatctctacggtgatgatgaggtatatcaagcaatacccgagaacggtgagcgtattcgtaaggatgggttacttgcagcaacacgcgaaatcgatcctatcctcagcgttgttgacatgatgacgtgtaaccttcagcgtgtggattatgtttacgatgatctcacttacgcggaaccgaatgcgcgtgtaacggatatcgatgttgtcagcgaccgacatcgtcgttctggacgtcaagcccgcgagcgtgcgattatgatggaagagaagatgcgtcctccgtatcgtcaattcctgaaatacgagaacgcgattggtttgctttacacccgaattcaggatgctgttcgtaagtacgaacgtgaacgcgttggtacgccgatacgtcatcatcaaacggtgatgtggtggttgaacctggctgatgctgaacacggtattgatatccgcaatcctaacggacagctacgtcatgtgttaccgacccgcgattaccgtaaagagaatctcgatgattggcgtgtgaccatcacatacacgtacgacgttgttccaggtatcgggtttaaattcaccggtatggcgggtgataaattcgtcgtaaccgacatcatggaagacgatgaaatgccggtcgaccaatggggtaacgttgcggacttcatgttcgacgatagtacggtaatcaaaaggatgagtttaagtcgtgttaacgcaccgtacatcaacggtgttggtgatcagatcatgcgtgaactgaaaccggtgatggatgcaggcgatctggagaccgcttggaacacactgatgcgctactactatatcgtcagtcctgaattcgtggaacaggttgttgaaaaatactgtatcacggatgaggataaatgggatcatttacggtacgtacaacgccatggtacggaagtttatatcccgacggacagtatcgcagcaggttcagaacgtatggagaatctgattcgtgagttcccgttgaagaaaggtcctgtacggtatcgtggacgttctgggcaatggcggacaaccaagaacgatattgcgatcggtgacacgtacatcatgatgttggagaagacggcgaacgactggtcagcggtgggcatccctaaactgcaagcgcatggattaccgtcgaaactcagtaatagcgataaatacagttctcctggtaaagagcaaccgactcgttactgtggcgaatctgaacatcgtgaagttaccgcctttgctggcggatggttcgcgagcgtctttatggattatgcgaacaatccaaaacaggtggatagcatcactgaaagtatctatgcgaccgataaaccgtcagcgattcctattgcaaccaacttcgagaagtatcccattggcggcaaccgtgcgttgaggatcctgtatcatcaactgaacgttgctggcggacaaatcatcgacgcagatgactgcgaaagctaa

SEQ ID NO: 907 - DNA, 411 bp, Goslarvirus sp.
  source 1..411: mol_type = genomic DNA
atggatcattcggatagcgtgatagcaatgattacaccacatctgttgcgcaaccttccagcaccgaacgtcaaaacgaagaatcataaccgtctgcttggattatatcgagactggcgggattctgaagggttgacacggatcgcgaacatcgatgcggcttatgatgcatttcgtgacgaacacgatgaaaacggtaatcttaagcccattgcagcgcagttacgtaaagatgtcggcgatgatgaagttcgcgatctccgcatctgcgaagaggttgctacgaagaccgctcgggggttaatgttgctggaactcttcggtgagcaaggccgtaccgaattgcggtctgaacttatcgcttgcttcgaagacacgttgctagaatttaaagatcgtcctcctttctga

SEQ ID NO: 908 - DNA, 423 bp, Goslarvirus sp.
  source 1..423: mol_type = genomic DNA
atgctgataaaaggaacggtttattttaactgcttaacactagaatgtgatgacttaaagaggatccctggtatgagtgataacgaaaatcgttccgtagcagtgaactacgttaataatttaatcttgcaagaacttacccgcgatgcggtaagggcatcaaataagctaggttttatcaaccaccacggacacatcatcgatattaaaaatcctgactgccagatcgtcgacatacgcagccaggtcgaacaagtagctaacgttatggttaaagccgaatactggctagaaactatgaaagagcatgttatccaaccccaacaattagatatcgacgttgatgaaattattgaacaagttgaagaatcgttcaatgaactcgtcaaccatcgtatcgaaaaagttttaaacgattgctaa

SEQ ID NO: 909 - DNA, 363 bp, Goslarvirus sp.
  source 1..363: mol_type = genomic DNA
atgaacttaattcgcaaattaacactgcaagaacttgcccgtccaatcggtattgaagcagcattgcatgatgaagatagcgatgcgctacaagtcgccgtgcttacagcgaccacgaactatgctgttgatgtaggcaccattgaaccggtacgtagttttgaagaagatgcaaccgttattgatacagttgctcaaaacgtcgcgcaaggtttggttgtgcttgacctggctggtgatgccggtgaagaagcgctgcgcgaagcgatggctgattacgctgccaactgggataccactgcagtgcagaaaacgttcgacggttccgaagaggattgtgttgaagaagacagcatagagtaa

SEQ ID NO: 910 - DNA, 96 bp, Goslarvirus sp.
  source 1..96: mol_type = genomic DNA
atgtcgttgtttttattttccgttatttctgacggaaataaagcaatatatgcaaaggcaacgtatatccaacatgtcatctatcctaacgtataa

SEQ ID NO: 911 - DNA, 486 bp, Goslarvirus sp.
  source 1..486: mol_type = genomic DNA
atggagatagcacacgccaacatatacggcgatggattaacggtatatgaagaaacatgggcggatgaacagattgtttggcttaacggattcagtgtcaaaaccattgaggatccagcgttaggcgtcgcatatgcgtatcccaccgacacgttagaacagctatttcaggatattcgaaatgatctcattgaggtggaaggtgcggatggaacgatttatggtcgagtcgataagtttggacgtgaccttctaggcgatcacccaaacatcattcgtatcggtatttatccgtatccgacattcccgcttgttgatggagtttatgttattcgaccaaagttagtcggtgaagaaaacgtatatcgcaatgataaagggcttcgtgtaaccgaggtgagacagataaaggggtttattctcaccgtttttgcggatatgtctgacgctatggatccatacgctttacaacagaaagctggataa

SEQ ID NO: 912 - DNA, 2007 bp, Goslarvirus sp.
  source 1..2007: mol_type = genomic DNA
atgactacaacacagacgaccaccacgaaacgtcgtgtgagggcacgcgagcttatgcactggccggttgatgaggtattcgagtgggcacagcctaatgaccgcgtatatatcgagatggacgatggcgttcatgaattacgtgcgcgacgcattttctttagttacatgcactggtctgtgcatcgcatgtatcctgagacaccactgacaaaagagaacctggttgataaacgcaagttcacagcgggttcatcggttgcgttgcaaagcgccgcgtatcgtcaatgcatgtatgcttacccacaagagaatcgtgaggttctctggaaagcattgttcgatatgtttaacaatgtgtataacttctttacgtatgcgttggaggaatacgtaacaacgatttgcgcggatgatttttatcagattactgtacaccccgaagttaagaaaatcatcgccgaagcggaacccacccgtgaaggtatcgaaagcgcatacaagaaactgaccaaggtactgagcaccgataaaacgttacatgcaaaccctattgcacgtgcggtaagaaccgaacacgtttcgattgggcaggtgctacagtgtattgggatgcgtggattcttgactgatattaactccgagatattccgtgatccagtaatgcggtcgtacgcagctggtttgatctctcttcccgacagcttgaaagaaagtcgttctgcggcgaaatcgttgctgttcaacaaagagcagattaaaaagtctgaatatttcggtcgtgaacttcagatagcgacagcggttgtacaacgacttcatcctggtgattgtggtagtaaagagaccatcccgatgccaatccgtgatgagaccgacctgcgtggcttccatggtcgattcattattcgtgatgacggttcgttggtagcgatacaaccacacatgaaagaattgattggtacgacggtacgcatgcgctccgtcaactattgtcatcatcccgatcctgctggggtatgtacgacgtgttatggtgaattaagtcataacttcgcactaaccgataatgtcggcgatggcgcagcgcgtacctgttcgcaacaggtaacgcagaacattctttctaccaaacaccacgatggttcgtcaacggtatccacagcaccaatcccaccggaatatcaacatatccttcgctacagccagaacatgaacgacatcaaactcgcacgtgagctgaaaggtaaacacgtgctgattaagatgaagttaggtcttgcgaacatgttgtacgacgtagccgaagcggaagaaattagttcgctgataccgcaacgtttgtttaacatgacgctttgcgatatggagatttacgacaggaaagatgaaagctatcgtaagctcaaagtcaatttcgatttctgcggtcgtcctgttgtaccgagtaaagcgtttatccgttatctaaaacgccatagctgggaagtgacgtctgacgggattgtgattttcgacttgaaacattgggacaattcacgtacgttattccagatgccgttaatccacaaaaacatgatggaatacgcaaaagaaatcgaacgtgagttcaaattcgggaaaggttctttcagtgccggattcctttcggaagacgaagcaacgccggaagaagttgcaaacgtgctgtattattggcatcgtctgtgtgcccagcgtctgcgaatgaacctttcgcatctcgatgttattctctacgccagcatgattcgttcgccacacacgaaagattatcgcatgccgaaacagggaacaacacgatacttcagtaccttcaagaagaacatgaacatgcgctccttgagtatgaagttcgctcaccaagagcaactggatgcgttccaaaacccgaacagttatatcccaaccatgaagccggatcatccgatcgactacatgctgttaccgcgtaaagaacctaaaccggaggatgtaatcacgttatga

SEQ ID NO: 913 - DNA, 2262 bp, Goslarvirus sp.
  source 1..2262: mol_type = genomic DNA
atgaagttagctcgtatcgacgtcttctcgcatggcatgaggctgagcggatacggacttcgatttgcccatcttatcggccattaccttcgagaccgttgtttgcatctgaggaaacggcgtgaccctcgtacacggagaatggttaccgataccataaacacgtatgccgcggcaagaagcgattatagcgaggtatacttactccgtgaacagttgaaatcgtttttggattttatcttttctcgagggatacgaaaagagtggttggaaatcgtctatcacgatccggtaccaggtaaagaagtggagttcgtaaagaaatggaagtttccatggcgtcaagatcagcaagaatggttggagtacatggacgggggtaaggatacccccttcagaatgagcctaaacaccgctcaaacagggtcaggaaaagcaattccgcttaatacacctgtgaaggttccaggcggttggaagccgattggcgagcttcagttaggggatcaggttattggtgcggatgggttaccgacgaacgtaaccgctatatttgatcatgacgatattcagctttatgctatcttctttgaggacggtaggatggttgaagcgtgtggtgatcatctctggcagtgtactgaccctgataaagttctcagtacggacgaaatcatggaatgtatttacgacagacctgctcgatctcgtccagtaagaatccgactttacgaaccgaaagaactcgtcggtctcgaggaatttaaggcggtaatcaaaggtcgttgtgaactgagaatcaaaaacggggaagctcaccttgcggtcagaaccgtcaattcgcagataacagccaaggtctgggagttggcttatcagttaggaggaattgcgtataaataccccattgatagttacataatggtgacattaatttaccattccgatttgcgtaagcttattcctgacgacattgagattccagacgatctccccgttaaccgacttcctggtttagcgattgatagcatcgtgccgacggtgaaatcgaaagcacgttgtatcacggtggacaatgacgaaagcctttatgttattaaagaccacatcgtcacgcataacaccgcgatgtcgcaggaaatcgtgtttaggcggggtgtacgcacaggtattatactttctccgcggtatatgccaggttggcgaagctcactgctgaacttcttcgggatggaaccaggggatgttatcgagatacgcgggaacgctaaggaggatccaccgcatcccgacattcctcgttacagtatgttggagtttcaaaccttggttgaacaaggtgaactcgacttcaaaatcgcattgttctccttgaacatgttccaacgttatattgcggactacgagaagaataactgcgttgcgccatatgccttccatcccgccgagttttgggaaaagaccggcataggccttctgattcatgacgagtgccatgaagcattgcatttcttgtttaaggtcaagtgttacgctagtattccggaaatcatctatctgtcagcaacggcggtgtccgacgatccattcatcgagcggatgttgtatttgatgtatccgaaagaagcccgttatgcaaaaggcgaatacaagaaatacattgcggtaaatgccgtgacgtatcgactacgcagtacagataaagtcagatacaaaggctttgggggttcttattctcacacgatattcgaacagtctatcatgaagaacaagcaactcaaactcgcgtactttaacttcatctataccgttataatcaaaggtttcatgaaccagtatcaggaaggtatgaagatgctggtgtattgtgcaaccgtcgatatgtgtaagtcgttgtcgcattatctcagtgaacgtattcctgagttagagattggtccttatactgctgaagaagatttcatggtcttgttggataacgatattagcgttacaaccgtgaaatcggcaggtacgggcatcgaccttcctgacttggtgatgacgttcatgacgttagcgatggggtcacgaaccggtaacattcaggtgttgggacggctacgtcagctgaaagggaagtttgaaggaatgacaccaacgttctggtatctggtatgtacttcgatagaagcacatcgtaaataccatcagcgcaaggtggagttcttcagcgacaaagtgcttacccagcgcgttatcgatgaagattttgaattgtaa

SEQ ID NO: 914 - DNA, 894 bp, Goslarvirus sp.
  source 1..894: mol_type = genomic DNA
atgtcaaaagtaagaggcgtgaaacaaatcgccaatttaatgatgttaagtggtgagacacagcaggaacgtgagttggtcttctttggcaaactggctgaggatggtgttgaacgtcttcgtcaagtagcatcaaaaattgaacatatggtgcaacatcaatggttgtttgataacacggccgttggtggtgtgaaaggtcaagtacgagcacgagctatacagatcgataacgaagaaccgaaatacatcatgaccacgaaggtgtatcgtggtccaggtgatgcaacggaaagcgaggtagaaattccagtcgagatgtttgatgccattgagcgtatggctccggaaggtcaagcgaaaacacgttacaccgtggaaagtccggacggcctggcgtgggaagtagacgttatctacacacgagatcaccaggttgttgagtgggcaaagatcgatattgaaattccggctggaacttctcttcgtgaaaatccgactttgcctgaagcgttgagtggtgttttcgttcagatgatcgatcgtccccacgcaaaacgtacggatgaagagaacgctattcttgacgatttgttcaagaacaaattcttcatcaagaacgataaggttgtagcgagcaaacttcctgaagggttcgatcgctttgttgatcctaaggtcgtcatcgaaatgttgatgcctgccatcgagcctctcgtaaatatgattccagcattaagctacaacgagaagtattttgatttcgatgaagaaggtcagctgaaaagcgcgttgcaagaactcaagcatgccgcactcggtgtcttacgtttaagtaagaaagacgtcgaagagtgtgattgcgaccaagataagaatggagaaaatgaatga

SEQ ID NO: 915 - DNA, 339 bp, Goslarvirus sp.
  source 1..339: mol_type = genomic DNA
atgaatatacaacaaatctgtttaatcgatgatcagttcagtgaaattaacggtgagcgttacaatgttgtaagctggacgctttcgatggttcaggctgctgaacaattcccgatggataaacataatcctgaagcgttccgcgatgtctataaacaaactcagctggctgaccgtaaactacccgaaggttacggtgatgataagctgttggaagatattaagcgtgcgttcgccctgcacatgctcaccttaaccgaagacgatcctttagaaatccccgatgggtggcttatctacgatacggaagcctacttcatgaaagaactctggttctaa

SEQ ID NO: 916 - DNA, 1455 bp, Goslarvirus sp.
  source 1..1455: mol_type = genomic DNA
atgaaactcaaacaaagctggaaagacgaacttctcgcgttagtaaacagcaaaaacagtttacaactgacattagacgatgtaaaatttgaactaacggcaccggtaagcgaagtgcctggaacggtcgttgttacaatcaaaccgaacgataatagtcgctactttaacgagcagtctctgacctacatccgtcgagacatcgctaaaaacttcaccgggatcccgttacgggttatcgttaagcaagataccgctgtaagggatatcatcaatacgattgctgaacgttacggattggtatttgacacaaccgtcgacttcctcgaatccgagctgaataaacaaattacgttcgcagacaccggtattaaagacattacggttccggttgcaaacacgtcttatgtttgggcgggtaatcttcagttcaatattgctaacgatacgttaagcttgattactatcatcaagaaaaccgatcttacgaatctggtttatctggatggtgttgaagctgacacatctggttcgttactattagcaaccgcagcacttgttaacgaacacgtaaatgaaccgatggttgaaaacgaagatatcgttaatgaatttattaacgttcttaatactctagccaaatatggtgacataaccggcgatgaattagatgccgccttacaagcgtacgatgaagcagaaaacaggaataaaaccacggtaataactcttggtgatatccagtgtgttgcaacagaaaaagacgattgggaaattggacgtttacgcggtcagatggttctcgcgctcaaatccgataaatacccggagcccgataacacgttcaggttgtttacgaatggtggtgacgtatcgctaacgttaaacacaatgaaagatataagtatcgattggggtgatgggaataaagtaacgttggatgctgaagaaagatacgcgcaccacacatacgccgacaataaccagtaccaaatcgaaattgtgtctcgtacggacccagatgtgctgcgaccaaattatatttctgggagtgagataaccgaagtaattcactgggctactacttcaacaatagctctgaattttgttggatgcgataatttagcgactgttccagatgagatcccaacttcgtggacaacgttggacagcatgtttgaaagttgtacgaatttgaatgatccgtctatctctaactggaatacaagtaacatcacatcaatgaatggtatgttcggcggatgcactaaatttaaccaacctttagctgcctgggatgtcagctcagtaactgacattggtggtatgtttaacggatgcaacagttttaaccaagatttaagtgggtggcgattaccgtcaggagtaacccacgacaattacgatagtggtgctttctcgtggcagacggaacataaaccgacgttccagtaa

SEQ ID NO: 917 - DNA, 2082 bp, Goslarvirus sp.
  source 1..2082: mol_type = genomic DNA
atgttggatagaatcaatcgtttaatgaaccgaatagcggttaaaaatcagagtaacaataccgtgcatatcgggggtatcgatgcctggcgtctttcagatgacattcagcgaatatggggtacctcccgatttatgaaacacatgtttcgtaatttctcttccagtggtctcagtctccacaacttttaccttcccgatttcgtttatattctcgaaacgatcatcgaggcaaagaatactcgcagtaataaacgcatgctgaaacaccttattgaggtactgctgcaggaaacctggttgcaaaataccacaatcgagcaacctgcaatcctcgataaagcacgcatgaacaaaatgctaacgctctccctgttcgattatcaagatgagtttatcgacatctataaccgtaacgtacctaaatatcgactgaaaggatacgtgtgtgcgatgggtgcgggtgccggtaaaacaatcaccgcgttggctttaagcgccgcaatgaacgtcgacgtatttgtggtctgctgtcctaagaacaccatgcgttcagcatggcaatccgatgtaaacaaagccatcgttgaccccgcaacagaaaccgcattctggtcagatacaatgccaccgtcacagctgcagaaaagcgataagtattattttctgcattacgagtcgatgggtttattaaacgatgtaatgatcaagcataaacgcaccgcgaagcgcgtgttgatcgtggttgatgaaagccataacttcaacgacaagaacagccaacgttcccaacgactggttgatctcgtacagacgatgcgtcagaccatgaatgcggatgtgcatgtcttgtttatgtcgggtacgcccgttaaacagatgggttctgagatgatcccctgtttaggttgtattgacccgatgttccaaggacaggtggtcgatagcttcaaagcaatttacggtttaaccagcagccgcgctaacgatatcctcagacatcgtcttgggttcatgatgcatgttgtacctaaagaggcttatcgtaaaacccggccggaagttcaggacgtttacgtgaagctccctaacggtagcgattataccatctcgagtatccgcgacgacatggcgatattcgtacgcgatcgggcgaagtattacaaggataactgggggcattacagaaagatttttgatgacgccttggactactatcgtaagactattcgtaccgatggtgaacgtaaagagctatctcgatacgaatcgattgttgctcgtttccagaaaggttacgaccccgtcagagacaaagaagatgcgatgttctgcaacgcgtttgaaaaacgttctattatgccggttcttccttctgatttaagggttgctttcaaagacgccaagagcgtcatcaagtacgttgggttgaaaattcagggtgaagcgttggcgcgtgttctaggtgcagcccgcattcggtgtcatgtcgacatggtggagtacatcgacttcgaagggtacatcaataacgctgaagccaaggtgttgatcttcacgtcgtacgttcaggtggttgagcgtgtcgacaacatgcttcgcgatgccggtttcttaccggaacccatttacgggaagaccaacaagaacatcaaccagatacttgctcgcttacgcgatgatcctgacagcggtcccgctatcgcaacatttgatagcttagccgaaggggttccgatgttgatgtgtaacgtgggtctcttcttgaacaacccatggcgttcatccgatgaaatccaagccatcagccgtctcgatcgtgtagggcaaacgcaacctgttcggatttatcgtttcatgttagatacaggaagcgagggtaacgtttctacacgtagccacgaaatcatggagttaagtcgacagcttgttgaagaaatcacaggcgtcaaatacgtggtgaacaagcaagatgctgttaacttgcaggaaacgttggcgatggaaggatacgatcaatacgttaccgtaaacaccacggaatacgatattaaaccacgacctgcgttcttggaatggtga

SEQ ID NO: 918 - DNA, 99 bp, Goslarvirus sp.
  source 1..99: mol_type = genomic DNA
ttgattctatccaacataatcgcgctcgatttaatagaatgtatgataaaaactcctccccacacctttcctggggaggaggccggggatgtcccttaa

SEQ ID NO: 919 - DNA, 99 bp, Goslarvirus sp.
  source 1..99: mol_type = genomic DNA
atgggtatcgaaacggaccaacacaaatcctttcacggctatattacttacgtgagtaaagaaaatttattaatagattcaaagaggtacgtgcaatga

SEQ ID NO: 920 - DNA, 687 bp, Goslarvirus sp.
  source 1..687: mol_type = genomic DNA
atgaaatctttatattcgttggattgtttaaatttcttatctcgggaaactcgcgctgaagtaattgaaaatattcggaagaacgatcttgcacatcaagaagaacatgtgcttgccgttgttgaactggcaaatgaacttgctgatgtggttgggatcatcagacccacggaacgtcgtcgtctattaaccgctgcatttatgcatgatatcgcttgccacgaaaacagaacataccaccaccttatcgggggtattcgtgcatcggttatcctgcttcgtaacgagcagcatattttcacaccggaagacatcgaggagatacgcgtacttattgctgaacatcgtgcctcgtattctggtccacgtagttcggttgcctctcaagtgcttcgtctggcggatatgggccgtctcgatagcgaacgttttggtatccgtgcaatcgaacatcgttacggccagatgagcaaagagttcgcattacaggaaaccgccgattatcttatttctaaatttgcgcctgacggctacgcttggattacctatccggcgttaggtcagcagctttatatgaaagagattgcgatgattaaatcgctctgtgcggatcgtgataaactcattgcttatttggatgatgtttatacgtatgttgaaaagaaacatggtgaaatcatgtgttaa

SEQ ID NO: 921 - DNA, 483 bp, Goslarvirus sp.
  source 1..483: mol_type = genomic DNA
atgagtatcgttgatttaacgttaacagaagttggtgatggtattgaggtttcgatgaaaacctccgacgatcgcaccgttgttgctaaactggaagaaacactgtacggcaattacgtggtgggcgtttcaggaaaggtgagtatgtatcgcctggctggtattttaagtgtctttgacggaggattgctgccgtccgaccaactcgagctccagaacaaattgatcgacaatgacttctacacggaaaacgtgaaagtctttggttacagcatgatgggtggcgtatttagcgccgcgacgaacacgcttaacttcggtacccaacaactgattcagttcagtatcgaagagggtaaactgaaaacagagtggaaaggtagcgctgcatacacgccaaccgatcttctgcttacttccgcagaacagcatttaaaagcaagtaaatcgggtcgtgcatttctggagcaattagatcaatga

SEQ ID NO: 922 - DNA, 537 bp, Goslarvirus sp.
  source 1..537: mol_type = genomic DNA
atgtcggatacccattttgatagcgagcgtacatggacgtattcacgccgtccgttcgcaagcgtcgccgatatgaaccagcatatgctgaaagccatcaacaatcttccaaagaacagtgtgttatggcatttaggtgattggggtaagttcgagttcgtggaagccattcgttctgatatccaggttcaattggtaatggggaattgggacgaagacgcatacaaagtgacaggattaagcttcgaagcgtggcgtgataaactgctcggtatggggtttgctgctgtttatgaacatccgttggtgttgccgattagcaatgacgaatcctactggctatgccataaacccagcgaaagaaacccaggctactttaatctattcgggcatattcatcgttgtatgttagcgaaggccaacggacttaacgtcggcgttgaccaacatttttacgcaccgattaatttggacaccgtacgtttttggcgtaatgcgatagaaaatcattacgacgaagaagtatggatggagtaa

SEQ ID NO: 923 - DNA, 276 bp, Goslarvirus sp.
  source 1..276: mol_type = genomic DNA
atgtctcgatcatcgacacaccacgacccctggaaacaatttcttagagagcttcattatcatgttgcagctcgaccaggcttgagcgcacaccaaatggaaatcgtcatacaggcgttaatcgcacgacaccctcaagttacacgtattaaatcattcattggatctggagagttctatgcttgcaaaaactattttagccatcgtgaccattacatctacttctattatcgcgcggttccttcgtcgatgacaggtcgcggtgtggaattttaa

SEQ ID NO: 924 - DNA, 462 bp, Goslarvirus sp.
  source 1..462: mol_type = genomic DNA
atgaaaacaaacaacaaaggcgttagaatgaagaattccattgttcgtcacgattcggatcgcgggttttttatcgatacggatatccttcacgatatttatttcaatgacgatcgtgaattagccgagcttgtagaacaacgctcggagacaatcgtcgcggctggaggaatatttaaacctcagcgatgggaggggcttgatgttagtatccgtcccatcatcagccgagaaacgccttttgaattactctttattttctcaccccgatcgttacccgatgagcagccgacaacgttatccttaacggctgaagttggttattggtcgtaccatatcgaacaaaacggtgtggtatgtgagggtacgctcgaaccgtcagaattaaagaagtttcttggtgccatcaaagaccaagaacgtaaacgtaaccgtgcaatacggaaacaaaaccggaattaa

SEQ ID NO: 925 - DNA, 522 bp, Goslarvirus sp.
  source 1..522: mol_type = genomic DNA
atgaaaaagttatttcttgcggctttctttattacggcatcagcacatgcttgggattatagcgaactggaaactggacacgctaaactaggcacgatgtatacctggtcatcagcagaagtcagtgcaccaaccaccctggaagttaactgcttgtctacggggggcgcgtgggtaaaactggatacggaagatgaaggttatcaggcacctcttcttcgtgactatccgggtatcgttaaaatcacgattggaaccgctgatggaatcagttatttcaatggagaaaccgatcttaacttctggtcgaagggcggacaacaacgtttggtgaacttcgttagtgaattgaaccaagcgttgaccatttcggtgttaaccgatgacggcaaaacgtatcgcgttcgtccgatcgagccggagatgcggatcgatgtccgtaaatgtccagcgggtgtgccagcaatggttgatcccaacacgcgtaccgtacgtacacctgaagaattgaacgcactttaa

SEQ ID NO: 926 - DNA, 264 bp, Goslarvirus sp.
  source 1..264: mol_type = genomic DNA
atgggtacacccatccaccttcacgaggctattatgacgaagaaaccaaagaaacgtaataagagatacaatccgaataaacgttcgaagtttacgctggtttacatgacggacactgagttccaggaagccaatcgacgtcatcgttgtctacgggaagcttacctcaatgaacatggctctaaggttctaacggctgctgacgatgttcctgaagaacagtttaccgatattcagttattcttatcaaaaggaattcaataa

SEQ ID NO: 927 - DNA, 957 bp, Goslarvirus sp.
  source 1..957: mol_type = genomic DNA
atgaaaacgcttattgatacgacatgccctcattgcggacatgacatttcgttggcatcgattcgttacgatatgttttcggatatgccgttgccgaacacgtgctatgtttgtactagctgtttgaaaaccgttaaggtatttgttgtcgataatagcgcagaacgccatatttcgtttatgccatcggatgaaaaacacgaagcgatttggtcgattattttctctaatacaactcgcccaaccaatccgtttgtttccagcacatcgatggctgttgatgtcgattgttttatgtctgagttaaccttgggtaccgtcgaacatattaacgcgatcgctgatctttatattggccagtcgttgaatcagggacatctgtcaccaaacgggactctctgcatcgaaggagacaactacgaagaggcaatgtcgcattaccgcacgcatctgacgatacccatgcgttacattagcgatattcaagaagccgcacttttcgcaaccgatcttgcgtggttatttaatgcggttattcatcaagcaaatgagggtacgttgctgcagaaagttgatggtaagatcggctggtgtcatagcgtgcgtagtgcggttatgatcgattacttattacgtaatcggtggattgctcaactgtttaattattggtatcaatacgtcttggattacgacgttgagccggttctttacagtgctgatggtagcgtctggttgtcgcacgggtttgttaaagggttggatgttgatgaacccctgttcctctatccaagaggatttcgggaactaacgtttgatgaggcaatggaactgttaaaacaggataaccccgtcaaccaccatgaagagaacgctcgtcgattcagtcctgatcgtaaagcgacgaatctgtccgacagcaatgcctcgataattccagcagatcgtgtcttgcattaa

SEQ ID NO: 928 - DNA, 777 bp, Goslarvirus sp.
  source 1..777: mol_type = genomic DNA
atgcttgcagcatacggtcaacacgaaccaacggtggtatgtgatgactgcgcaagccgctacatactggtgcgtgaaggagacgatgatggggtccaacttaagttacgtgatacccatgaatatcggcttcgcgttgttgcggtattggctccaccgtaccagaagggggaaccccgtaaagcagcatggacattcgcagagtttgatgtaacgcttgataaaccgattacgaaaggcctttcaccgttcaatgatatcgttgagtataacaacatcaaaaacgcggttgctgaattgctcccattgtcaccacacagttgtgtctatggggttggaactctaccgcaggtgtgttgtgtcttaccacgagaaacgtatatggtgttaggtgtccggcaactgattaagttctttggggtatatgacgatatgttgagtaagatcggcgagcttctggtcaacatgtcgaaaataaaagatgttagccagaagaacaaagatgtgcgcatcagtcatgcgatttgtgcgcatctgatggcggggtcgatgtggttgggcgattacgctaacactattatcagtcagctatcaatttcgtacgaagttgtgtttaaagatggcgtgttctacggtgtgcgtcgtaaagatacgactttccagctgaagaaaatcgttctcgacctacctatcgatcatcttatcgccaatgttatttctgatccatcacgcgttgtcgacatgatacgtggaaaactaaaaggtaacccagcatga

SEQ ID NO: 929 - DNA, 303 bp, Goslarvirus sp.
  source 1..303: mol_type = genomic DNA
atgaaacgactatctgcaagacaggtgtcgttgtgttactacggaatggagtacgatgccttagcaaaattgtttcgtcagtatcttgaagatcatcaccttaccaacgatgatctcttttcttattcttatttgaattacccaattaacatgatacgttattcggaagctgaaggtgaatacctggtggtcgcttctgttatgcgttatctgttaattgatctatacaaacgtctatttctgccgaagagactacgtatgcaagaaacattaaggagacttcatagtgagcgttttacgtga

SEQ ID NO: 930 - DNA, 597 bp, Goslarvirus sp.
  source 1..597: mol_type = genomic DNA
gtgagcgttttacgtgaagcgtttaagttcgttgctggggaacagaccgatgatgatattcggcgattcatggcgtatatcgcaccgctgagtcacgatggtgtcccaggacataatgtgttcctgccgttgaggggtgtttcgacaacagccgcctatgtccgtctgttaaccgagatgttgcggattagtgagcatcctggtggtaccaaccgtgtcagtttgaaagggcttgctgagcagttatcttacatgcctgttatccgtgagaaaccatcgtgggcggaagaacgtcgcgcgttaaccctgatacgcaatctggattctgatgcttggcgtgagaacctcatcacgtatttgttgatcatcaaacgtcgtcagaaaccagcgaagagtctgctcatcatcgatgataacgacccgaacgttgatttggttgagatcacacgagcaataagcgcgttgaccggtgaatcaatcaatcctaaacttgaaccgttggccgcaatccgtcagatggtcgccacgctgtctgataatactgcgtttgtcaatatttgcagcgattacgataaggaaaaggagggtatacgatga

SEQ ID NO: 931 - DNA, 342 bp, Goslarvirus sp.
  source 1..342: mol_type = genomic DNA
atgatagacagcatcgaacttaatgaagagcaaccgttatcggtcgtacaacaacttttagcgcagcatgagcttgtttggtcggaagagcgctcgccatgtgaagaatgtcgctataaccacgttgttgctgagaccgtttttggttctctaactatcgaatggaaaggttggaaagactatacaagctacgactgcgatttacctttcccagtcaacgatgagttttcgcacatcaacgcagatagtttagatgaggcgaaagcaaaagtaaaagcttggtacgactacgtgatattagctggacttggtttggctgctaataaaccagaactgaactaa

SEQ ID NO: 932 - DNA, 1245 bp, Goslarvirus sp.
  source 1..1245: mol_type = genomic DNA
atgaggtataacaaaatggctttaaccatcacaattgacaataaagaacttaatcccgcagaaacattaatgtacgcggcgattgcgactttacctaatcttgacgttgaaaaactgtttaaggtacacggcagtgacctgctcaacattatccacgatcaaatcgaaccgataacaccagaggaaataaatggggacaaagaactcctcgaagaaattaaaagaggagagtattatacgtatcacggtttcatgacgttatttcaggaagatacgtcgcatcttcacgagataacattacggtattatctgcgctgcgctattatccaactgatgaatcatcgcgaagaaacgcataaggcgctagctcagtcgttccagggaacaacatttggggctccgtataaaccgttagatatcgttcatcttttttactcaattggtcgttatatcaaaaaccaagagttggtgataatcgagcagaacgaccgtgcgcttataccactgctaagtaaattgggcattgacttagtagcagagaataagacattctctcagttcgtccatgagacgtttctcgctgctgaaccaacgccacgtttcgaaggatattttgatttttcagcggtagagaaacctgcgttttgcctggatgtggagaatctcagtctggaaaagaacggggtactgctggaaatcggcatcttgttctttgatctagctaatccagaatctgttattaacggcccacgtatagatatcttccctgacgtttatggtcaaatcgctgatggtggtgatattagtaagtccacggtagaatggtggcaaaccaaagcaccgaaggaagcgcgcgactattgttttcagcatgacggagtgatggactataaagaagccattaccacagtgaatgcgtttgttaacaatatccgtgatgaaatgaccgaatattacggtaaggatgccttctattatcttgctcgcggtgaaacagattggcctcaattagagcattggttccgtaaagcaggctttaagccagtttgtcgttataaccaggttcaggatatccgttcgatgattgccgcatatcaagacaaaccggtatccatcttaggtaccaaagagtatccagatatgggtattccgttgatccgtcataccgctatcggtgacgcaatcatggatgcgtatgacgttgcgaaggcgcgaagcatggcggcgtctaagcttctgaagtga

SEQ ID NO: 933 - DNA, 315 bp, Goslarvirus sp.
  source 1..315: mol_type = genomic DNA
atgtctgaaaagcatattgagattcttgatgctgctattgcttcgaaagatagcgataagttcatcaaagcggtatttgcagaacagcgtaataacccagcaacgttgaataaaattcgcgatgcaatcgcattccgtcttaccaagtcagatgtttctgatgcggataaaacaacgatgcgtaaattacgtgatgatcttaatgcatacatcgctcgtggttgtacggataaaaccgttcgtgaggttctcgattctaacgtgaaatacgaatccgacttcaagaagaacggttcaacaccgaaaacagaataa

SEQ ID NO: 934 - DNA, 300 bp, Goslarvirus sp.
  source 1..300: mol_type = genomic DNA
atgctcgatcgtgaacgattgaagaaaacgacaaagctcctcgatgagttcagaactgcgggtgaattcgagagcttcactaagaaccgagctattgttcggttccttctttatttgtgttgcgttgattcgtcggagcgggttagccatagttgccctctgctcgacgaaaatcgtattccgttatacaaagccgaagagttatgtgcgttcttgatgaaattcggtgttttctgcaacagatatcgtggtgatagatccgatgggtatcttgtcgaatttaatgtcttgtttcagtaa

SEQ ID NO: 935 - DNA, 534 bp, Goslarvirus sp.
  source 1..534: mol_type = genomic DNA
atgagtgttatcgtaaaagtaatgggtaactgcgatactagcgatcgtaacaacgcgaaaccgtttacgttgcatgtggtgcctgaccgtttgaccacaattgaattcaaccgtgattcgatgggtagaccgacactggagttcgtcgctcatggcgataaggatcaacgatttatcgattacccgggcggtaacgtttacgtgatggacaacggtaataccatcgcaacgtacgcctattcctgtggttttgggaaggatgatgttgaccgtatgtatgcggacgtccgtgctacgacgtatggggaagtgttggatacgagtggtaaactcgacgatcgccttatttgtgcgttgttggaaatacgtttaatcgatcgtgatataaaacaaacgcgcaatatcgagtttgtaaaatcagacaatcctaactttgttagtcatgtaaatcgtcttttacaagagttgtttactggtgaattaacggcatattacgccggtgcgagcggcaaaatcatcgcggtcgttaagtag

SEQ ID NO: 936 - DNA, 549 bp, Goslarvirus sp.
  source 1..549: mol_type = genomic DNA
atgtctatctttttgaaaatgatgagcggttacaatctccctgatgagaacaacgcaaagccttgtacgattctaccgctttcggataaatgtaagattgaattcggtcgcgacgagtacggtgcacctgttgtgaccgtcacccatgaagacggaacagtcgagagttatcatcccgaagggaatacttaccttactgaagatcgtcgtacgatcgcagcttattcttattctgagtatgtgtcacctggtcgtcgtatgacggtagagtctgcgatgaaagaccttaagtactacgatgattacatgcagttcgcaaccaataaccggatcgtacatttcctatccgtgttagctggcgttcctcgcgggcaaaacataacccgtaaatgtcgtctgtctgttgacgatcgtatcggggtatcagtcatcgataaacttagcgagtttatcgtggatatgggctattgcttcgttggttataccgcgacaaatccgatggacgatgaagctattcatgttctcgaattcgctgttcttgtgaaataa

SEQ ID NO: 937 - DNA, 969 bp, Goslarvirus sp.
  source 1..969: mol_type = genomic DNA
atgggaggcttttatgccgtcttaccctatctatcaaaactaacggattttaagaattctctgaagtcgggagaggagattaaaatgttaacatcagatcatacacgctatcgtgttaaatacctgaaacgttttaaaggtgcacaacctaaaatcgtggttcaaagaacaattacttgcctggaatacacaggtcatccccttacggaaatatatttcaaaacgctggatgttatcgatctaacccgggtgttcaggggacataaactcacagtaaataacatcacgttgcaagaagcaaccgaggaattccgtaaactattcaattattttctgtgttcatacgggattaaattcaacgaagtagaaatacgactacataaccacccaagaaaatcaccgtatcttgcggttagaccaaagaaaggacggatggctttaattggttgtgtccgtattcctatcgttcaatctgaaccggttcgtccgattatcacggtaaataagatcggagcgcttgctggacatgtaatcaacaacgtcttggtgattaccgacgataaaagtttgcattgtgtgtctgatgtaacgagcgagcaattacgaaacggtatcgcccttcttttctatcgtggtgatggaaacgttgtcgaattctgtcatcagcaggattgctgcgaagaggtgtatcttgaagacattgacggcgatattaatgatatcatcggtgaaaagatactcagtgctgaagaaagaaccgaggaaagaaccgatgactacggctattatagcgaacgtacacaatggacattctaccatatccgtactgcaaagggttgtgttgttatccgttggtatggtagttctaacggctattactcagagagtgttgatatcgacgtcgtaccacttaaagatagccttctgagaaaaccaaaacggctcgaggaacgctacggtcgttattga

SEQ ID NO: 938 - DNA, 204 bp, Goslarvirus sp.
  source 1..204: mol_type = genomic DNA
atgttaacgaaggaatctaagaagaacattgaagcgtggatttttgatgatgtgccattgaatctatcatcggatccgaaggttcgtggtttacaagttgattacgcgtataacgtgttacatggctgctgttacacgttaagcaatcctaaatatcgttataaatttcaggaactactcgaaacacttagaggattaaaatga

SEQ ID NO: 939 - DNA, 1020 bp, Goslarvirus sp.
  source 1..1020: mol_type = genomic DNA
atgaaacagtatttggaccttttgcaagacatcatggataacggtcgcgataaggccgaccgcacgggcaccgggacccgttcggtattcgggcgtcagatgcgttttgacttgaagaaaggatttccgctggtaaccaccaagaagattcaccttaagagcgttatccacgaactgctctggtttcttaacggcgacacaaacgttgcttatcttcaagataacggtgttcgtatttggaatgaatgggctgataaggaagggaatctaggaccgatttacggcagacaatggcgagaatggattgactacaaagtggttgttccgcatgatacagaacgtactcgtgagttgatgcaacgcggctatgagtattgcggtgttgttgacgccggtatggtcaaacatctcttgtatgttaaacaccacgaccaaatcgcaaacatgatgcgtcaactcaaagaagatcctgattctcgacgaatcatcgttagcgcgtggaacgtaggtgatttagacgatatgcatctcgctccgtgccattcattctatcagttctatacccacgaactcacgatcgatgaacgcgttgattatgtccagcgcaatgacgtactaagaacccagtgggttacggatgatgtacgacacagtgaaacagaactctggttgaatgcgcataacgtaccaacacgtgctttatcctgtcagctttatcaacgttcgtgcgacacgctcttgggttggagctttaacgtcgcatcatactcgttgttaacacatatgcttgcccaacagctgaatatggacgttggtgagttcgtgtggacaggtggagattgtcatatctatcacaaccatttcgaacaggttaaagaacaacttagtcgtgagccgtatccattaccgaagctaacaatcgtacgtaaaccagaaagtattacggattaccgttacgaagactttgtgttcgtcggatatcaatcacaccccgctatcaaggctaaggtggcagtgtaa

SEQ ID NO: 940 - DNA, 261 bp, Goslarvirus sp.
  source 1..261: mol_type = genomic DNA
atggatgaacgagtaaccactatcggtttttatctcactggtgttactgaagcattacccacaccgaaaaatagttacgagatggaggctgatagcatacttacacaaacccttcctatacagcttaaagcggaaattaacgaacgtctacgcgtcgatatgcttacgaaagaacagcgtgaatccttgctggaagcattagataccatcgacaagagaatgacgcttcttaaattaggttttaagaagcaactgcattaa

SEQ ID NO: 941 - DNA, 147 bp, Goslarvirus sp.
  source 1..147: mol_type = genomic DNA
atggcttggtcatatccctatcgtattctgataggtgttaaaaataagaaaggtcctcgtaaaggtaaatggagatacacctggatatgcggacagatagaactaaaaccgagaatcttctcggcctggagtaaaagtgatgattaa

SEQ ID NO: 942 - DNA, 204 bp, Goslarvirus sp.
  source 1..204: mol_type = genomic DNA
atgattaattctctacagcgccatatactaaatcatgttatcaacgacatgattggtgttcgtttagtcaaaggaaaacacaagaaaggttgcaataaaggaaaacggttcgtggcgcatgtggtaccaaccaccgaacgaaggatcgcaaatgctgcggtggattctatcgcgaaagcgatgccatggcttatgttggactga

SEQ ID NO: 943 - DNA, 198 bp, Goslarvirus sp.
  source 1..198: mol_type = genomic DNA
atgcaatgtctcgaagaaacagaagcgggtaccctggcttatatcgatccggtgtatttatcccgatttatcgttgatcgatatttggatcgtgtttataacaaacgtattaaacgaggcccgggtaaaggcagacagaagaaagtaggtatctataaataccataaagcgcctaatccgatgtattgttggaggtag

SEQ ID NO: 944 - DNA, 318 bp, Goslarvirus sp.
  source 1..318: mol_type = genomic DNA
atgctaaacatcgcctattttcgtcgatgttggtatattcatcagtaccgcaaaaacaggaatcagattatcgaaataaagtttcatattgactctttactcaaactagagaaggtgaaagaacagccgttggttgtcgttcggttgaggtctttattagagcgtttacgtatagcgtcgcaggtgaatgagcagcttaatcaggcgaataaagcgcgatcagcacgggatgtacggaaatgttatcgttccggatttaaccatcgattgaaaagtatacgtaacagtttaaagcatataacggagaaagtggaatga

SEQ ID NO: 945 - DNA, 399 bp, Goslarvirus sp.
  source 1..399: mol_type = genomic DNA
atgataacgagtcaagttaacctagccgttaacagctataccgcttttgttgatttacttgataaattacgtaagcgaattgaatggcggctccaatatttcgatgaacgccagagccggataaccggcgagttgttatccgataaatctgttatttatctaagccatcatcgacttcttgatgaattatcccaattaagaaaagagtttatcgatctcggtgtttctacgaaaataaatacggagactgtgacaaaagatgacttgaaggtttatttcagccgttattgtgatttgaaatcatccctcaggcggatatatcaagactttaatagattagtgaaaagcacaaccacgactctcctgattgctgaacgaggtacaacatcatggaattaa

SEQ ID NO: 946 - DNA, 642 bp, Goslarvirus sp.
  source 1..642: mol_type = genomic DNA
atggaattaatggaaacaaaagaagagaaatacacacaactgaagaagaaactggaaaggcaaggttttctagcgaaacgtttaatccgtgttatgcgttataaatacaaatgctattttggtacagagctaccgaatggtgacgggcttgttagtgagtgtcgtcggacgatttcgcgcgttaacgatttactatcgcgtaatgattggtggtacaaagaatcggaaaacttcactgaaaccgaccgccgtaccgtatcccatttagaaagccagttgaaagagttaatggaagacagggccaacttacaacgtcgaatccatcaacgattcgatgactgggagaagggggcttttattaacggtgatgagatacgtatcgataacatcatcagacgccttatcgctaaagacgatgaggaagatttaccgttaccggacgatcacgataccgcgaaacaagttctcgaacaagcggtacgttgcatgggtgctttgctctccctgggtcatatcgaacgcaaaaagatcgttcaatgtaaattcgaaaaacttcttgttcagttccatcgcaagttcttttatagcaccgaaaaagaagttgctgtacaactaatagaaggtatcaatgaagttaaatag

SEQ ID NO: 947 - DNA, 369 bp, Goslarvirus sp.
  source 1..369: mol_type = genomic DNA
atgaagttaaatagaactgttcggagtatacagtcattttggtatcgatattggtttaatcgtaatttacgtgacttcgttcggcttatccgttatgtgaagctcatgataaattgtcgtgagttaaatagagggttggggataggtagtgcgaggaaatatacgtacgatacagacccgtttatcgagtactgcaattcgtatataagagatatcgtggttctgatgaaatcgagccatgagttgtttatggattgcgattcttgctacaagtcctttctcggacgccgtgttcgtgcgaatcgaataagaaatgcgatttctatgttgcattggcgattttactattttccagaccccgataaataa

SEQ ID NO: 948 - DNA, 327 bp, Goslarvirus sp.
  source 1..327: mol_type = genomic DNA
atgaatcagacagctataattgatatttataactaccgtaaatacacatccatgctcgatgctgcgacttcgctgttagaacacaagttacgcgaatgcaacacacagaccgccacagaagaagttctggatatcacacagttgttacttgatcgtttaaaagaacttcgaatttacgtcgcgagcatgtatggaaatggtcccgatgctgtatgtatcgcttacaacaaaccaagattgaccgtggagaagattatcgagcaaactggtaatattgacaatgaaatcaacgcctttataagcggcgtcaatacgttaaaactttaa

SEQ ID NO: 949 - DNA, 309 bp, Goslarvirus sp.
  source 1..309: mol_type = genomic DNA
atgatgaaaatgaacgaaaacaaatgtgaactggttccagatgaaaggttggttgagattcgtaactacttcctggccaatgaagagaacaaaccattcttcgtcttttcggataataaacatcaagcaacctgtgaactcgctgcagccgagggtatgcgtgatgcgttagtatatcgactggaagcgaaacgatctgttgtatcagacacgacagagatcgataatgcaatcaaggtagtcgatcgtcggtatgacgagttacttaccgaatacgagaacggatcgcaaacggtaattcttcactaa

SEQ ID NO: 950 - DNA, 294 bp, Goslarvirus sp.
  source 1..294: mol_type = genomic DNA
atggagacgcagatgttcaacagttcgatggtgtattacggtagtatcgttcaggtattggtacctttcatcgatgaacgtacctgtttagcggcagacgcacggtatattcaacgttgggtaaaacttgggcgattaacacgaaaacatttacagcatgcgacgacctcaacccatgctgcgattcatcttattgaccctaactttcgcgacggtaaaagacatattcacctttatcgtgaaagttatgtccgctggttagaaaacgcattaaaggataaagaacatgagtaa

SEQ ID NO: 951 - DNA, 486 bp, Goslarvirus sp.
  source 1..486: mol_type = genomic DNA
atgagtaacacagttaaacttaatgaaaacaatttttcaaaactggacgattttatcgaagaatatatcgagaaaaagcaatgggctattatcagtgtcgctcctgatgagggaagcgacgagcctggctttatgtatactgttggtctaaccgaacacggaatgccggaaatcttcgtatccggttattgccctgctctcggttcagcaatcaacaaactgggtaacttcatggtgaaggcaaagaccatcccgttaggcgcgttcgatggcaatctaactctgaaaggtacgggtgaaaccttgcgtcttgacgtgcgtgaaatagaggatattgaatccttcaacgaagtgtatgcgatagcggctttcgctcgatatggtaaaaaggttgcgggtattcagctcgtttggcctgacaccagcaatacgttaccacatgaaggtggttacgaatcatgctgctgtccgcagatcctgctttaa

SEQ ID NO: 952 - DNA, 255 bp, Goslarvirus sp.
  source 1..255: mol_type = genomic DNA
atgctgctgtccgcagatcctgctttaatcttaataccaataattaaattgtttataggagtttttgtgaaatcgaccatcagccgcactgattttcatcccgatcgtattgcggagacctttgctcgtatggataataacacattcgcagtgttgttcaacagcggatttgattctaccaacgagacccatcgttctaccggtgtgactatcgatgcggaatgtgtccatgttaaggaaacaagcgcggaataa

SEQ ID NO: 953 - DNA, 375 bp, Goslarvirus sp.
  source 1..375: mol_type = genomic DNA
atgtatgtcattatcgatgatgttgaaggacgacagctaacaccagttcaatcgttacgattgcgtaatgctgcactgatgtacgctgtgttatggtgggattgtaaaacacgtttacctagcgatgcaaaatcgatgcgacgctattcagaagcattagtgtcgtgtgggcatgatgagatctttcaacgactctttgagcggctatcaggttatcaagcaatcattcggaagggtttgtttatctcgattgagtggttcggtactgagttgcggttaatcgttgaccgcaagggcatgacgttacgccctaacacattcgagtcgacacgagcgattgcttggtgggacgaggaaggtaatcgtctctggtga

SEQ ID NO: 954 - DNA, 117 bp, Goslarvirus sp.
  source 1..117: mol_type = genomic DNA
atggtgaataatgaagagtatacggaaataaaatcttgggttgctaaagcgctgcttgcgtatagcgctgtcggcgtactgtttgctgtaatcggcatggtaggtatgctacgatga

SEQ ID NO: 955 - DNA, 267 bp, Goslarvirus sp.
  source 1..267: mol_type = genomic DNA
atgagcatcgaggatgactttttacggaacgcacttgacttttattctaaaccattaacacccggtgggttggaattgggtgtggtcaatcccgataaactgcatccaattgctaaatggttgaatcaacatcgagaagggctgtattccgttgaccaaccggaactggtggcacgctggcatattaagaaaaacggtctcgatatgtcgttaaatgcgcgtgtgaacaaagaccatattgccctatcgatcatgggtactttttaa

SEQ ID NO: 956 - DNA, 978 bp, Goslarvirus sp.
  source 1..978: mol_type = genomic DNA
atggcttctattggcccaatcgataagacacgcgatgcggtaaaggcgttgctcgaaagaatttattttgagcttgcgaatgctgaacatccaagcgtgagtcttttcgacgataaactcacagcgattaataacgttcatccgatgctatatcaggatctccttacgtcatggaaaccgatgggtgttttcgctaacgctttttcagataccgtcgtagccagcggctttgaaaaaccgaagctaccttttgtctatgagccgtcagtcgatccaaaacgcgagcgtctgggtgttttaacgcacgcattgattgacagtattggttattatctttcctctgaatggacagccaaatacaccgagctgttagacgaatacgaactgtggcgtaatcagatcttaacggatgcggagaagaaagcgtacgcgatcgcgttggcagagaaaacccgtggggatgttggtcgcttaatccacgatttttacgcggttttgaaaccaacctactacgaaacaaaacgtcagctgacctgggaagaagcacgggcgttgatgcagaacgcagaaacagcggatgatgttgcgggtataatccacgattactgtatgtcaagaatcctgctggataaaggcaatcagaaatacgttcgtgaggttccgcttcccaataacgcgctgggtatcgcaaacgagattttcgagttcctgaacgagtggaatccaccgttacttgcgattacgtatatctgcgatgatattcttactgaggatctgttccttccattgttaggtgaagcgtcgctgcgacgttattcccaaacgttcaagaacagcgcaacgatggcatctaccgtaccggttagtttaccacgtcgtcgtaaaatgcttacggtatccgcaggtaagattaacctcttagtgttgtattatgctgtaagaaacggcttaccaacattaattttcaggaaaaagtaa

SEQ ID NO: 957 - DNA, 138 bp, Goslarvirus sp.
  source 1..138: mol_type = genomic DNA
atgttatccagttttcgatgtgggataatgcaagttcgagagaacagcattttggagaaatctgtatgtttatttgttgaatcaatgaaaggggttttgtacagtcgcttcagccatttactttttcctgaaaattaa

SEQ ID NO: 958 - DNA, 231 bp, Goslarvirus sp.
  source 1..231: mol_type = genomic DNA
atgtggcaacgcattcgtggtcgcataccgcaatacgtaaatgtgatgggtgttctgttagtaagtgataccgaagcgttcgaaagccatccgttgtgttacgccgatgtggtggttacggataacccaacaatgcttgaacgcatgcaggccgtactgaccaatccggttcgaacggaaatagtcatcaacattatcggaacgccaatcgatgagcagaacatttcttaa

SEQ ID NO: 959 - DNA, 486 bp, Goslarvirus sp.
  source 1..486: mol_type = genomic DNA
atgagcagaacatttcttaaatggcttgggaacaaaaccaggcttatccctgagattgaaaaagtgttacctaaaggaaagcgtcttgttgaaccattcgttggttccggcgctgttacgcttgctcttaagtacccagcgtattcgataggtgatgcgaatgaggatattctctcagtatggtctgcgttgctagcgcgtccagaatctttcatcgaagaagtggaacgtctttttcaaacggatcctaccgacgtcagaagctactacgagatacgtgaacgttttaaccgcgctgaagatccgtgggaacgcgcagtttgcttcatgtatttaaaccgttacggtttcaatggcttatgtcgttataatcgtgatggtttatttaatgttgcgcgtgggcggtataagaccgtctatttcccgaaacaggaattgcgtctggcagcgaaccatcttcaggctgccttcgtcgagggggggtag

SEQ ID NO: 960 - DNA, 300 bp, Goslarvirus sp.
  source 1..300: mol_type = genomic DNA
gtggttccgggtgacgtcgtttattgcgaccctccttatattcccatttcccccaccgcatcgtttacgggctatactcaagaggggtttacattagacgatcatcgttatcttgcagaaaaggctgacaacttgcgctcgcggggaattcctacaatcattagcaacagtgcttgtgcgttgactgaagagatttatagttcggcgacaaaattgtaccctgtaactgtacgaagaacgatttcggcaaaagtagaaacaagaaacttggtttcagaatatttgatagtttatgaatag

SEQ ID NO: 961 - DNA, 294 bp, Goslarvirus sp.
  source 1..294: mol_type = genomic DNA
atgcgttattggaaactttctgcttatcaaattgcgttattaggtattgataccaaagaaaaagaattgttgcacggtgaactcgacaccgcttatctttcagaaaacaacatggttgtatgtaaatttgttggattaacgactcgacgtaatgtggtacatgaaacctatgcgttgaagggtaagggcatgcaggaagttgctgctgtgattcgtaccggtattgtggtaccgcctggcgtaagtgataatcttgatgaggtgttacatggaactcgtaaaacagcccgttaa

SEQ ID NO: 962 - DNA, 621 bp, Goslarvirus sp.
  source 1..621: mol_type = genomic DNA
atgaggtgttacatggaactcgtaaaacagcccgttaatgcgtggacgctcatgccggatgaagcggttcgctacggcttctttaggaaacacgccccgaagctcatggatggtaccatcggaccggaacaagatctgatgtatgtcgtgttgttcgatgactatcgtgcgatggcgatttacggtgagtcgggaaaagcacacgtcgtacacatcgaacgttatgtgttcaatgagttggatgttaaggaacagtttgacgccatcatgatgaacacgaaacccgtacctgaacagatcaagcttcagttcctcacgatgttgaatccggatgaacggacggtgcgacttattcgtaacgatcctgccacccaggaactcacggaagtattactggatctgaaactgcacgtcgccctcgaacgtgcggaaggtggtaaagttaatacctgcatccgtcaattctgtaaactacgtgaagcgaaggttaaacatcatcagacacggaatatcctgaaagcgattcgttctgttgcgttacctgaaattaaaatgaaggaagtactgtctttatacgaagcctatatgaacgacgaagtcgaatgcgttgtgaagtcttga

SEQ ID NO: 963 - DNA, 96 bp, Goslarvirus sp.
  source 1..96: mol_type = genomic DNA
ttgcctgtgtccctcccatcacgggcgggcacgggcgttatgccgatgtacattttgacaattttttggtttcgtatggaggaaacgacaacatga

SEQ ID NO: 964 - DNA, 285 bp, Goslarvirus sp.
  source 1..285: mol_type = genomic DNA
atgattctacagatgctcggctgcctgtatttatccggctggctaattgaaatagttacagtgaccatcgggttacataagcacggtattaaatccccaacctacacgcttccagcacattgctttgcgatgatgggagcattcccttttatcgccctcgggtcgattttctggccgctgttttggttcgaacgtcggttgcccgaagaagttcgacagaaacgtcgtcgtgacgcactcgctcgccgagaagaacgccagagaaacaaaggtaaacgtaaatga